(19) United States
(12) Patent Application Publication
(10) Pub. No.: US 2022/0315982 A1
(43) Pub. Date: Oct. 6, 2022

(54) METHODS FOR IDENTIFICATION OF ANTIGEN BINDING SPECIFICITY OF ANTIBODIES

(71) Applicant: VANDERBILT UNIVERSITY, Nashhvikke, TN (US)

(72) Inventors: Marion Francis SETLIFF, Nashville, TN (US); Ivelin Stefanov GEORGIEV, Brentwood, TN (US); Andrea SHIAKOLAS, Nashville, TN (US)

(21) Appl. No.: 17/640,475

(22) PCT Filed: Sep. 4, 2020
(86) PCT No.: PCT/US20/49330

§ 371 Date: Mar. 4, 2022

Related U.S. Application Data
(60) Provisional application No. 62/895,687, filed on Sep. 4, 2019.
(60) Provisional application No. 62/913,432, filed on Oct. 10, 2019.

(51) Int. Cl. C12Q 1/6804; C12N 15/10; C12Q 1/70

(52) U.S. Cl. CPC C12Q 1/6804; C12N 15/1096; C12Q 1/70

(57) ABSTRACT

The present disclosure relates to a method for simultaneous detection of antigens and antigen specific antibodies. LIBRA-seq (Linking B Cell Receptor to Antigen specificity through sequencing) is developed to simultaneously recover both antigen specificity and paired heavy and light chain BCR sequence. LIBRA-seq is a next-generation sequencing-based readout for BCR-antigen binding interactions that utilizes oligonucleotides (oligos) conjugated to recombinant antigens.

### CROSS REFERENCE TO RELATED APPLICATIONS

[0001] This application claims the benefit of U.S. Provisional Patent Application Ser. No. 62/895,687 filed Sep. 4, 2019 and U.S. Provisional Patent Application Ser. No. 62/913,432 filed Oct. 10, 2019, the disclosures of which are expressly incorporated herein by reference.

### STATEMENT REGARDING FEDERALLY SPONSORED RESEARCH

[0002] This invention was made with government support under Grant No. R01 AI131722 awarded by the National Institutes of Health. The government has certain rights in the invention.

### REFERENCE TO SEQUENCE LISTING

[0003] The Sequence Listing submitted Sep. 4, 2020, as a text file named “10644_104WO1_Sequence_Listing,” created on Sep. 4, 2020, and having a size of 676342 bytes, is hereby incorporated by reference.

### FIELD

[0004] The present disclosure relates to methods for identification of antigen binding signal from a sequencing-based readout and determination of antibody sequence-antigen specificity associations.

### BACKGROUND

[0005] The antibody repertoire—the collection of antibodies present in an individual—responds efficiently to invading pathogens due to its exceptional diversity and ability to fine-tune antigen specificity via somatic hypermutation (Briney et al., 2019; Rajewsky, 1996; Soto et al., 2019). This antibody repertoire is a rich source of potential therapeutics, but its size makes it difficult to examine more than a small cross-section of the total repertoire (Brekke and Sandlie, 2003; Georgiou et al., 2014; Wang et al., 2018; Wilson and Andrews, 2012). Historically, a variety of approaches have been developed to characterize antigen-specific B cells in human infection and vaccination samples. The methods most frequently used include single-cell sorting with fluorescent antigen baits (Scheid et al., 2009; Wu et al., 2010), screens of immortalized B cells (Buchacher et al., 1994; Stiegler et al., 2001), and B cell culture (Bonsignori et al., 2018; Huang et al., 2014; Walker et al., 2009, 2011). However, these methods to couple functional screens with sequences of the variable heavy (V_{H}) and variable light (V_{L}) immunoglobulin genes are low throughput; generally, individual B cells can only be screened against a few antigens simultaneously. What is needed are high-throughput systems and methods for the simultaneous detection of antigens and antigen specific antibodies.

### SUMMARY

[0006] In some aspects, disclosed herein is a method for simultaneous detection of an antigen and an antibody that specifically binds said antigen, comprising:
[0007] labeling a plurality of antigens with unique antigen barcodes;
[0008] providing a plurality of barcode-labeled antigens to a population of B-cells; allowing the plurality of barcode-labeled antigens to bind to the population of B-cells;
[0009] washing unbound antigens from the population of B-cells;
[0010] separating the B-cells into single cell emulsions;
[0011] introducing into each single cell emulsion a unique cell barcode-labeled bead;
[0012] preparing a single cell cDNA library from the single cell emulsions;
[0013] performing PCR amplification reactions to produce a plurality of amplicons, wherein the amplicons comprise: 1) the cell barcode and the antigen barcode, 2) the cell barcode and an antibody sequence, and 3) a unique molecular identifier (UMI);
[0014] sequencing the plurality of amplicons;
[0015] removing a sequence lacking the cell barcode, the UMI, or the antigen barcode;
[0016] aligning the antibody sequence to a reference library of immunoglobulin V, D, J and C sequences;
[0017] constructing a UMI count matrix comprising the cell barcode, the antigen barcode, and the antibody sequence;
[0018] determining a LIBRA-seq score; and
[0019] determining that the antibody specifically binds an antigen if the LIBRA-seq score of the antibody for the antigen is increased in comparison to a control sample.

[0020] In some embodiments, the barcode-labeled antigens are labeled with a first barcode comprising a DNA sequence or an RNA sequence. In some embodiments, the cell barcode-labeled beads are labeled with a second barcode comprising a DNA sequence or an RNA sequence.

[0021] In some embodiments, the antibody sequence comprises an immunoglobulin heavy chain (VDJ) sequence, or an immunoglobulin light chain (VJ) sequence.

[0022] In some embodiments, the barcode-labeled antigens comprise an antigen from a pathogen or an animal In some embodiments, the antigen from a pathogen comprises an antigen from a virus. In some embodiments, the antigen from a virus comprises an antigen from human immunodeficiency virus (HIV), an antigen from influenza virus, or an antigen from respiratory syncytial virus (RSV).

[0023] In some embodiments, the method of any preceding aspect further comprises determining a level of somatic hypermutation of the antibody specifically binding to the antigen

[0024] In some embodiments, the method of any preceding aspect further comprises determining a length of a complementarity-determining region (CDR) of the antibody specifically binding to the antigen.

[0025] In some embodiments, the method of any preceding aspect further comprises determining a motif of a CDR of the antibody specifically binding to the antigen. In some embodiments, the CDR is selected from the group consisting of CDRH1, CDRH2, CDRH3, CDRL1, CDRL2, and CDRL3.

[0026] In another aspect, disclosed herein is a method of determining a broadly neutralizing antibody to a pathogen, said method comprising:
[0027] labeling a plurality of antigens derived from the pathogen with unique antigen barcodes;
[0028] providing a plurality of barcode-labeled antigens to a population of B-cells;
[0029] allowing the plurality of barcode-labeled antigens to bind to the population of B-cells;
[0030] washing unbound antigens from the population of B-cells;
[0031] separating the B-cells into single cell emulsions;
[0032] introducing into each single cell emulsion a unique cell barcode-labeled bead;
[0033] preparing a single cell cDNA library from the single cell emulsions;
[0034] performing PCR amplification reactions to produce a plurality of amplicons, wherein the amplicons comprise: 1) the cell barcode and the antigen barcode, 2) the cell barcode and an antibody sequence, and 3) a unique molecular identifier (UMI); sequencing the plurality of amplicons;
[0035] removing a sequence lacking a cell barcode, unique molecular identifier (UMI), or an antigen barcode;
[0036] aligning the antibody sequence to a reference library of immunoglobulin V, D, J and C sequences;
[0037] constructing a UMI count matrix comprising the cell barcode, the antigen barcode, and the antibody sequence;
[0038] determining a LIBRA-seq score; and
[0039] determining that the antibody is a broadly neutralizing antibody if the LIBRA-seq scores of the antibody for two or more antigens are increased in comparison to a control.

[0040] In some aspects, disclosed herein is a polynucleotide comprising a sequence set forth in the specification.

[0041] In some aspects, disclosed herein is a polypeptide, wherein the polypeptide is encoded by a polynucleotide sequence set forth in the specification.

[0042] In some aspects, disclosed herein is a polypeptide comprising a sequence set forth in FIG. 2 or FIG. 3.

[0043] In some aspects, disclosed herein is a therapeutic antibody comprising the polypeptide of any preceding aspect.

### DESCRIPTION OF DRAWINGS

[0044] The accompanying figures, which are incorporated in and constitute a part of this specification, illustrate aspects described below.

[0045] FIG. 1. LIBRA-seq assay schematic and validation. (A.) Schematic of LIBRA-seq assay. Fluorescently-labelled, DNA-barcoded antigens are used to sort antigen-positive B cells before co-encapsulation of single B cells with bead-delivered oligos using droplet microfluidics. Bead-delivered oligos index both cellular BCR transcripts and antigen barcodes during reverse transcription, enabling direct mapping of BCR sequence to antigen specificity following sequencing. Note: elements of the depiction are not shown to scale, and the number and placement of oligonucleotides on each antigen can vary. (B.) The assay was initially validated on Ramos B cell lines expressing BCR sequences of known neutralizing antibodies VRC01 and Fe53 with a three-antigen screening library: BG505, CZA97 and H1 A/New Caledonia/20/99. (C.) Between the minimum (y-axis, top) and maximum (y-axis, bottom) LIBRA-seq score for each antigen, the ability of each of 100 cutoffs was tested for its ability to classify each VRC01 cell and FE53 cell as antigen positive or negative, where antigen positive is defined as having a LIBRA-seq score greater than or equal to the cutoff being evaluated and antigen negative is defined as having a LIBRA-seq score below the cutoff. At each cutoff, the percent of total VRC01 cells (left column of each antigen subpanel) and percent of total FE53 (right columns) that are classified as positive is represented on a white (0%) to dark purple (100%) color scale. (D.) The LIBRA-seq score for each pair of antigens for each B cell was plotted. Each axis represents the range of LIBRA-seq scores for each antigen. Density of total cells is shown, with purple to yellow indicating lowest to highest number of cells, respectively. (E.) The LIBRA-seq score for BG505 (y-axis) and CZA97 (x-axis) for each VRC01 B cell was plotted. Each axis represents the range of LIBRA-seq scores for each antigen. Density of total cells is shown, with purple to yellow indicating lowest to highest number of cells, respectively.

[0046] FIG. 2. LIBRA-seq applied to a human B cell sample from HIV-infected donor NIAID 45. (A.) LIBRA-seq experiment setup consisted of three antigens in the screening library: BG505, CZA97, and H1 A/New Caledonia/20/99, and the cellular input was donor NIAID45 PBMCs. (B.) After bioinformatic processing and filtering of cells recovered from single-cell sequencing, the LIBRA-seq score for each antigen was plotted (total=866). Each axis represents the range of LIBRA-seq scores for each antigen. Density of total cells is shown, with purple to yellow indicating lowest to highest number of cells, respectively. (C.) 29 VRC01 lineage B cells were identified and examined for phylogenetic relatedness to known lineage members and for sequence features, with phylogenetic tree showing relatedness of previously identified VRC01 lineage members (black) and members newly identified using LIBRA-seq (red). Each row represents an antibody. Sequences were aligned using clustalW and a maximum likelihood tree was inferred using maximum likelihood inference. The resulting tree was visualized using an inferred VRC01 unmutated common ancestor (UCA) (accession MK032222) as the root. For each antibody isolated from LIBRA-seq, a heat map of the LIBRA-seq scores for each antigen (BG505, CZA97, and H1 A/New Caledonia/20/99) is shown; blue-white-red represents low to high scores, respectively. Levels of somatic hypermutation (SHM) at the nucleotide level for the heavy and light chain variable genes as reported by the international ImMunoGeneTics information system (IMGT) are displayed as bars, with the numerical percentage value listed to the right of the bar; length of the bar corresponds to level of SHM Amino acid sequences of the complementarity determining region 3 for the heavy chain (CDRH3) and the light chain (CDRL3) for each antibody are displayed. The tree was visualized and annotated using iTol (Letunic and Bork, 2019). CDRH3 Sequences in FIG. 2C: AMRDYCRDDNCNKWDLRH (SEQ ID NO: 770); AMRDYCRDDNCNRWDLRH (SEQ ID NO: 771); AMRDYCRDDSCNIWDLRH (SEQ ID NO: 917); AMRDYCRDDNCNIWDLRH (SEQ ID NO: 918); VRTAYCERDPCKGWVFPH (SEQ ID NO: 919); VRRFVCDHCSDYTFGH (SEQ ID NO: 920); VRRGHCDHCYEWTLQH (SEQ ID NO: 921); VRRGSCDYCGDFPWQY (SEQ ID NO: 922); VRRGSCGYCGDFPWQY (SEQ ID NO: 923); VRGSSCCGGRRHCNGADCFNWDFQY (SEQ ID NO: 924); VRGRSCCGGRRHCNGADCFNWDFQY (SEQ ID NO: 925); VRGKSCCGGRRYCNGADCFNWDFEH (SEQ ID NO: 926); VRGRSCCDGRRYCNGADCFNWDFEH (SEQ ID NO: 927); TRGKYCTARDYYNWDFEH (SEQ ID NO: 928); TRGKYCTARDYYNWDFEY (SEQ ID NO: 929); TRGKNCDDNWDFEH (SEQ ID NO: 930); TRGKNCNYNWDFEH (SEQ ID NO: 931). CDRL3 sequences in FIG. 2C: QHRET (SEQ ID NO: 907); QFLEN (SEQ ID NO: 906); QDQEF (SEQ ID NO: 904); QDRQS (SEQ ID NO: 905); QQFEF (SEQ ID NO: 908); QCLEA (SEQ ID NO: 903); QSFEG (SEQ ID NO: 915); QCFEG (SEQ ID NO: 902); QQYEF (SEQ ID NO: 911). (D.) Antigen specificity as predicted by LIBRA-seq was validated by ELISA for a subset of monoclonal antibodies belonging to the VRC01 lineage. ELISA data are representative from at least two independent experiments. (E.) Neutralization of Tier 1, Tier 2, and control viruses by VRC01 and newly identified VRC01 lineage members, 2723-3131, 2723-4186, and 2723-3055. (F.) Sequence characteristics and antigen specificity of newly identified antibodies from donor NIAID 45. Percent identity is calculated at the nucleotide level, and CDR length and sequences are noted at the amino acid level. LIBRA-seq scores for each antigen are displayed as a heat map with the overall minimum LIBRA-seq score for each antigen displayed as light yellow, 0 as white, and the overall maximum LIBRA-seq score for each antigen as purple. ELISA binding data against BG505, CZA97, and H1 A/New Caledonia/20/99 is displayed as a heat map of the AUC analysis with AUC of 0 displayed as light yellow, 50% max as white, and maximum AUC as purple. ELISA data are representative from at least two independent experiments. VDJ junction sequences in FIG. 2F: ARHRADYDFWNGNNLRGYFDP (SEQ ID NO: 939); ARHRANYDFWGGSNLRGYFDP (SEQ ID NO: 940); ARHRADYDFWGGSNLRGYFDP (SEQ ID NO: 941); ARDEVLRGSASWFLGPNEVRHYGMDV (SEQ ID NO: 942); VGRQKYISGNVGDFDF (SEQ ID NO: 943); ATGRIAASGFYFQH (SEQ ID NO: 944); AREHTMIFGVAEGFWFDP (SEQ ID NO: 775); VTMSGYHVSNTYLDA (SEQ ID NO: 945); ARGRVYSDY (SEQ ID NO: 946); VJ junction sequences in FIG. 2F: QQYGSSPTT (SEQ ID NO: 912); QQYGTSPTT (SEQ ID NO: 913); MQSLQLRS (SEQ ID NO: 899); QQYTNLPPALN (SEQ ID NO: 914); HHYNSFSHT (SEQ ID NO: 892); SSRDTDDISVI (SEQ ID NO: 916); QQYANSPLT (SEQ ID NO: 910); QQSGTSPPWT (SEQ ID NO: 909). Sequences in FIG. 2 can also be found in Table 3 and Table 4.

[0047] FIG. 3. LIBRA-seq applied to a sample from NIAID donor N90. (A.) LIBRA-seq experiment setup consisted of nine antigens in the screening library: 5 HIV-1 Env (KNH1144, BG505, ZM197, ZM106.9, B41), and 4 influenza HA (H1 A/New Caledonia/20/99, H1 A/Michigan/45/2015, H5 Indonesia/5/2005, H7 Anhui/1/2013), and the cellular input was donor N90 PBMCs. (B.) 18 VRC38 lineage B cells were identified and examined for phylogenetic relatedness to known lineage members as well as for sequence features, with phylogenetic tree showing relatedness of previously identified VRC38 lineage members (black) and members newly identified using LIBRA-seq (red). Each row represents an antibody. Sequences were aligned using clustalW and a maximum likelihood tree was inferred using maximum likelihood inference. The resulting tree was visualized using the germline IGHV3-23*01 gene as the root. For each antibody isolated from LIBRA-seq, a heat map of the LIBRA-seq scores for each HIV antigen (BG505, B41, KNH1144, ZM106.9 and ZM197) is shown; blue-white-red represents low to high scores, respectively. Levels of somatic hypermutation (SHM) at the nucleotide level for the heavy and light chain variable genes as reported by IMGT are displayed as bars, with the numerical percentage value listed to the right of the bar; length of the bar corresponds to level of SHM. Amino acid sequences of the complementarity determining region 3 for the heavy chain (CDRH3) and the light chain (CDRL3) for each antibody are displayed. The tree was visualized and annotated using iTol (Letunic and Bork, 2019). CDRH3 sequences in FIG. 3B: VRGPSSGWWYHEYSGLDV (SEQ ID NO: 932); IRGPESGWFYHYYFGLGV (SEQ ID NO: 933); ARGPSSGWHLHYYFGMGL (SEQ ID NO: 934); VRGPSSGWHLHYYFGMDL (SEQ ID NO: 935); VRGASSGWHLHYYFGMDL (SEQ ID NO: 936). CDRL3 sequences in FIG. 3B: MQARQTPRLS (SEQ ID NO: 897); MQSLETPRLS (SEQ ID NO: 937); MQSLQTPRLS (SEQ ID NO: 938); MEALQTPRLT (SEQ ID NO: 894); METLQTPRLT (SEQ ID NO: 896); MESLQTPRLT (SEQ ID NO: 895). (C.) Sequence characteristics and antigen specificity of newly identified antibodies from donor N90. Percent identity is calculated at the nucleotide level, and CDR length and sequences are noted at the amino acid level. LIBRA-seq scores for each antigen are displayed as a heat map with the overall minimum LIBRA-seq score for each antigen displayed as light yellow, 0 as white, and the overall maximum LIBRA-seq score for each antigen as purple and ELISA binding data is displayed as a heat map of the AUC analysis calculated from the data with AUC of 0 displayed as light yellow, 50% max as white, and maximum AUC as purple. ELISA data are representative from at least two independent experiments. VDJ junction sequences in FIG. 3C: ARDAGERGLRGYSVGFFDS (SEQ ID NO: 947); AKVVAGGQLRYFDWQEGHYYGMDV (SEQ ID NO: 948). VJ junction sequences in FIG. 3C: HQYGTTPYT (SEQ ID NO: 893); MQSLQTPHS (SEQ ID NO:900). (D.) Neutralization of Tier 2, and control viruses by newly identified antibody 3602-870. (E.) BG505 DS-SOSIP binding to 3602-870 IgG alone or in presence of PGT145 Fab (green), PGT122 Fab (blue) and VRC01 Fab (black). (F.) For each combination of HIV SOSIPs (left) or influenza hemagglutinins (right), the number of B cells with high LIBRA-seq scores (>=1) is displayed as a bar graph. The combinations of antigens are displayed by filled in dots indicating a given antigen is part of the indicated combination. Each combination is mutually exclusive. The total number of B cells with high LIBRA-seq scores for each antigen is indicated as a horizontal bar on the bottom left of each subpanel. Sequences in FIG. 3 can also be found in Table 5 and Table 6.

[0048] FIG. 4. Sequence properties of the antigen-specific B cell repertoire. (A.) V gene usage of broadly HIV-reactive B cells. For each IGHV gene, the number of B cells with high LIBRA-seq scores for 3 or more HIV SOSIP variants is displayed as a bar, including B cells with high scores to any 3, 4 or 5 SOSIPs. (B.) Each dot represents a IGHV germline gene, plotted based on the number of B cells reactive to only 1 SOSIP (x axis) and the number of B cells reactive to 3 or more SOSIPs (y axis) that are assigned to that respective IGHV germline gene. IGHV genes above the dotted line (y=x) could indicate enrichment for broad SOSIP antigen reactivity, and IGHV genes below the dotted line — enrichment for strain-specific SOSIP recognition. (C.) IGHV gene identity (y-axis) is plotted for cells with high (>=1) LIBRA-seq scores for each of 1 through 5 HIV-1 SOSIP antigens (x-axis). Each distribution is displayed as a kernel density estimation, where wider sections of a given distribution represent a higher probability that B cells possess a given germline identity percentage. The median of each distribution is displayed as a white dot, the interquartile range is displayed as a thick bar, and a thin line extends to 1.5× the interquartile range.

[0049] FIG. 5. Purification of DNA-barcoded antigens. (A.) After barcoding each antigen with a unique oligonucleotide, antigen-oligo complexes are run on size exclusion chromatography to remove excess, unconjugated oligonucleotide from the reaction mixture. DNA-barcoded BG505 was run on the Superose 6 Increase 10/300 GL column and all other DNA-barcoded antigens were run on the Superdex 200 Increase 10/300 GL on the AKTA FPLC system. For size exclusion chromatography, dotted lines indicate DNA-barcoded antigens and fractions taken. The second peak indicates excess oligonucleotide from the conjugation reaction. (B.) Binding of VRC01 or Fe53 Ramos B-cell lines to DNA-barcoded, fluorescently labeled antigens via flow cytometry. VRC01 cells bound to DNA-barcoded BG505-PE, DNA-barcoded CZA97-PE, and not DNA-barcoded H1 A/New Caledonia/20/99-PE. Fe53 cells bound to DNA-barcoded H1 A/New Caledonia/20/99-PE.

[0050] FIG. 6. Ramos B-cell line sorting scheme. (A.) Gating scheme for fluorescence activated cell sorting of Ramos B-cell lines. VRC01 and Fe53 Ramos B cells were mixed in a 1:1 ratio and then stained with LiveDead-V500 and a DNA-barcoded antigen screening library consisting of BG505-PE, CZA97-PE, and H1 A/New Caledonia/20/99-PE. Gates as drawn are based on gates used during the sort, and percentages from the sort are listed. (B.) For each experiment, the categorization of the number of Cellranger-identified (10× Genomics) cells after sequencing is shown. Each category (row) is a subset of cells of the previous category (row).

[0051] FIG. 7. Identification of antigen-specific B cells from donor NIAID 45 PBMCs. (A.) Gating scheme for fluorescence activated cell sorting of donor NIAID 45 PBMCs. Cells were stained with LiveDead-V500, CD14-V500, CD3-APCCy7, CD19-BV711, IgG-FITC, and a DNA-barcoded antigen screening library consisting of BG505-PE, CZA97-PE, and H1 A/New Caledonia/20/99-PE. Gates as drawn are based on gates used during the sort, and percentages from the sort are listed. These plots show a starting number of 50,187 total events. Due to the visualization parameters, 18 IgG-positive, antigen-positive cells are displayed, but 3400 IgG were sorted and supplemented with 13,000 antigen positive B cells for single cell sequencing. A small aliquot of donor NIAID45 PBMCs were used for fluorescence minus one (FMO) staining, and were stained with the same antibody panel as listed above with the exception of the HIV-1 and influenza antigens. (B.) LIBRA-seq scores for BG505 (x-axis) and CZA97 (y-axis) are shown. Each axis represents the range of LIBRA-seq scores for each antigen. Density of total cells is shown. Overlaid on the density plot are the 29 VRC01 lineage members (dots) indicated in light green. (C.) Antigen specificity as predicted by LIBRA-seq was validated by ELISA for a variety of antibodies isolated from donor NIAID 45. Antibodies were tested for binding to BG505, CZA97, and H1 A/New Caledonia/20/99. ELISA data are representative from at least two independent experiments.

[0052] FIG. 8. Characterization of antibody lineage 2121. (A.) Binding of BG505 DS-SOSIP trimer to (a) PGT145 IgG, (b) VRC01 IgG, (c) 17b IgG, and (d) 2723-2121 IgG. (B.) Inhibition of BG505 DS-SOSIP binding to 2723-2121 IgG in presence of VRC34 Fab (diamond), PGT145 Fab (square) and VRC01 Fab (triangle). (C.) Neutralization of Tier 1, Tier 2, and control viruses by antibody 2723-2121 and VRC01. Results are shown as the concentration of antibody (in □g/ml) needed for 50% inhibition (IC5o). (D.) Levels of ADCP, ADCD, ADCT-PKH26 and ADCC displayed by antibody 2723-2121 compared to VRC01. HIVIG was used as a positive control and the anti-RSV mAb Palivisumab as a negative control.

[0053] FIG. 9. Identification of antigen-specific B cells from donor N90 PBMCs. (A.) Gating scheme for fluorescence activated cell sorting of donor N90 PBMCs. Cells were stained LiveDead-APCCy7, CD14-APCCy7, CD3-FITC, CD19-BV711, and IgG-PECy5 with and a DNA-barcoded antigen screening library consisting of BG505-PE, KNH1144-PE, ZM197-PE, ZM106.9-PE, B41-PE, H1 A/New Caledonia/20/99-PE, H1 A/Michigan/45/2015-PE, H5 Indonesia/5/2005-PE, H7 Anhui/1/2013-PE. Gates as drawn are based on gates used during the sort, and percentages from the sort are listed. 5450 IgG positive, antigen positive cells were sorted and supplemented with 1480 IgG negative, antigen positive B cells for single cell sequencing. A small aliquot of donor N90 PBMCs were used for fluorescence minus one (FMO) staining, and were stained with the same antibody panel as listed above without the antigen screening library. (B.) Antigen specificity as predicted by LIBRA-seq was validated by ELISA for two antibodies isolated from donor N90. Antibodies were tested for binding to all antigens from the screening library: 5 HIV-1 SOSIP (BG505, KNH1144, ZM197, ZM106.9, B41), and 4 influenza HA (H1 A/New Caledonia/20/99, H1 A/Michigan/45/2015, H5 Indonesia/5/2005, H7 Anhui/1/2013). ELISA data are representative from at least two independent experiments.

[0054] FIG. 10. Each graph shows the LIBRA-seq score for an HIV antigen (y-axes) vs. an influenza antigen (x-axes) in the screening library. The 901 cells that had a LIBRA-seq score above one for at least one antigen are displayed as individual dots. IgG cells (591 of 901) are colored orange and cells of all other isotypes are colored blue. Red lines on each axis indicate a LIBRA-seq score of one. Only 9 of the 591 IgG cells displayed high LIBRA-seq scores for at least one HIV-1 antigen and one influenza antigen, confirming the ability of the technology to successfully discriminate between diverse antigen specificities.

[0055] FIG. 11. Sequencing preprocessing and quality statistics. (A.) Quality filtering of the antigen barcode FASTQ files. Fastp (Chen et al., 2018) was used to trim adapters and remove low-quality reads using default parameters. Shown are read and base statistics generated from the output html report from each of the Ramos B cell experiment (left), primary B cell experiment from donor NIAID45 (middle), and primary B cell experiment from donor N90 (right). (B.) Shown is a distribution of insert sizes of the antigen barcode reads from the Ramos B cell line experiment, as output from the fastp html report. (C.) Shown is a distribution of insert sizes of the antigen barcode reads from the donor NIAID45 experiment, as output from the fastp html report. (D.) Shown is a distribution of insert sizes of the antigen barcode reads from the donor NIH90 experiment, as output from the fastp html report.

[0056] FIG. 12. Architecture of antigen barcode library. The antigen barcode library is composed of the cell barcode, unique molecular identifier, a capture sequences (the template switch oligo sequence), and an antigen barcode.

[0057] FIG. 13. Schematic of cell barcode — antigen barcode UMI count matrix. This is created from the sequencing of antigen barcode libraries and used in subsequent analysis to determine antigen specificity.

### DETAILED DESCRIPTION

[0058] Recent advances in next-generation sequencing (NGS) enable high-throughput interrogation of antibody repertoires at the sequence level, including paired heavy and light chains (Busse et al., 2014; Dekosky et al., 2013; Tan et al., 2014). However, annotation of NGS antibody sequences for their cognate antigen partner(s) generally requires synthesis, production and characterization of individual recombinant monoclonal antibodies (DeFalco et al., 2018; Setliff et al., 2018). Recent efforts to develop new antibody screening technologies have sought to overcome throughput limitations while still uniting antibody sequence and functional information. For example, natively-paired human BCR heavy and light chain amplicons can be expressed and screened as Fab (Wang et at, 2018) or scFV (Adler et al., 2017b, 2017a) in a yeast display system. Although these various antibody discovery technologies have led to the identification of a number of potently neutralizing antibodies, they remain limited by the number of antigens against which single cells can simultaneously be screened efficiently.

[0059] LIBRA-seq (LInking B Cell Receptor to Antigen specificity through sequencing) is developed to simultaneously recover both antigen specificity and paired heavy and light chain BCR sequence. LIBRA-seq is a next-generation sequencing-based readout for BCR-antigen binding interactions that utilizes oligonucleotides (oligos) conjugated to recombinant antigens. Antigen barcodes are recovered during paired-chain BCR sequencing experiments and bioinformatically mapped to single cells. The LIBRA-seq method was applied to PBMC samples from two HIV-infected subjects, and from these, HIV- and influenza-specific antibodies were successfully identified, including both known and novel broadly neutralizing antibody (bNAb) lineages. LIBRA-seq is high-throughput, scalable, and applicable to many targets. This single, integrated assay enables the mapping of monoclonal antibody sequences to panels of diverse antigens theoretically unlimited in number and facilitates the rapid identification of cross-reactive antibodies that serves as therapeutics or vaccine templates.

[0060] Disclosed herein are systems and methods for simultaneous detection of antigens and antigen specific antibodies.

[0061] Reference will now be made in detail to the embodiments of the invention, examples of which are illustrated in the drawings and the examples. This invention may, however, be embodied in many different forms and should not be construed as limited to the embodiments set forth herein.

[0062] Unless defined otherwise, all technical and scientific terms used herein have the same meaning as commonly understood to one of ordinary skill in the art to which this disclosure belongs. The term “comprising” and variations thereof as used herein is used synonymously with the term “including” and variations thereof and are open, non-limiting terms. Although the terms “comprising” and “including” have been used herein to describe various embodiments, the terms “consisting essentially of” and “consisting of” can be used in place of “comprising” and “including” to provide for more specific embodiments and are also disclosed. As used in this disclosure and in the appended claims, the singular forms “a”, “an”, “the”, include plural referents unless the context clearly dictates otherwise.

[0063] The following definitions are provided for the full understanding of terms used in this specification.

### Terminology

[0064] As used herein, the terms “may,” “optionally,” and “may optionally” are used interchangeably and are meant to include cases in which the condition occurs as well as cases in which the condition does not occur. Thus, for example, the statement that a formulation “may include an excipient” is meant to include cases in which the formulation includes an excipient as well as cases in which the formulation does not include an excipient.

[0065] As used herein, the term “subject” or “host” can refer to living organisms such as mammals, including, but not limited to humans, livestock, dogs, cats, and other mammals. Administration of the therapeutic agents can be carried out at dosages and for periods of time effective for treatment of a subject. In some embodiments, the subject is a human

[0066] “Nucleotide,” “nucleoside,” “nucleotide residue,” and “nucleoside residue,” as used herein, can mean a deoxyribonucleotide or ribonucleotide residue, or other similar nucleoside analogue. A nucleotide is a molecule that contains a base moiety, a sugar moiety and a phosphate moiety. Nucleotides can be linked together through their phosphate moieties and sugar moieties creating an internucleoside linkage. The base moiety of a nucleotide can be adenin-9-yl (A), cytosin-1-yl (C), guanin-9-yl (G), uracil-1-yl (U), and thymin-1-yl (T). The sugar moiety of a nucleotide is a ribose or a deoxyribose. The phosphate moiety of a nucleotide is pentavalent phosphate. A non-limiting example of a nucleotide would be 3′-AMP (3′-adenosine monophosphate) or 5′-GMP (5′-guanosine monophosphate). There are many varieties of these types of molecules available in the art and available herein.

[0067] The term “polynucleotide” refers to a single or double stranded polymer composed of nucleotide monomers.

[0068] The method and the system disclosed here including the use of primers, which are capable of interacting with the disclosed nucleic acids, such as the antigen barcode as disclosed herein. In certain embodiments the primers are used to support DNA amplification reactions. Typically, the primers will be capable of being extended in a sequence specific manner. Extension of a primer in a sequence specific manner includes any methods wherein the sequence and/or composition of the nucleic acid molecule to which the primer is hybridized or otherwise associated directs or influences the composition or sequence of the product produced by the extension of the primer. Extension of the primer in a sequence specific manner therefore includes, but is not limited to, PCR, DNA sequencing, DNA extension, DNA polymerization, RNA transcription, or reverse transcription. Techniques and conditions that amplify the primer in a sequence specific manner are preferred. In certain embodiments the primers are used for the DNA amplification reactions, such as PCR or direct sequencing. It is understood that in certain embodiments the primers can also be extended using non-enzymatic techniques, where for example, the nucleotides or oligonucleotides used to extend the primer are modified such that they will chemically react to extend the primer in a sequence specific manner Typically, the disclosed primers hybridize with the disclosed nucleic acids or region of the nucleic acids or they hybridize with the complement of the nucleic acids or complement of a region of the nucleic acids.

[0069] The term “amplification” refers to the production of one or more copies of a genetic fragment or target sequence, specifically the “amplicon”. As it refers to the product of an amplification reaction, amplicon is used interchangeably with common laboratory terms, such as “PCR product.”

[0070] The term “polypeptide” refers to a compound made up of a single chain of D- or L-amino acids or a mixture of D- and L-amino acids joined by peptide bonds.

[0071] As used herein, the term “antigen” refers to a molecule that is capable of stimulating an immune response such as by production of antibodies specific for the antigen. Antigens of the present invention can be, for example, an antigen from human immunodeficiency virus (HIV), an antigen from influenza virus, or an antigen from respiratory syncytial virus (RSV). Antigens of the present invention can also be, for example, a human antigen (e.g. an oncogene-encoded protein).

[0072] In the present invention, “specific for” and “specificity” means a condition where one of the molecules involved in selective binding. Accordingly, an antibody that is specific for one antigen selectively binds that antigen and not other antigens.

[0073] The term “antibodies” is used herein in a broad sense and includes both polyclonal and monoclonal antibodies. In addition to intact immunoglobulin molecules, also included in the term “antibodies” are fragments or polymers of those immunoglobulin molecules, and human or humanized versions of immunoglobulin molecules or fragments thereof, as long as they are chosen for their ability to specifically interact with the HIV virus, such that the HIV viral infection is prevented, inhibited, reduced, or delayed. The antibodies can be tested for their desired activity using the in vitro assays described herein, or by analogous methods, after which their in vivo therapeutic and/or prophylactic activities are tested according to known clinical testing methods. There are five major classes of human immunoglobulins: IgA, IgD, IgE, IgG and IgM, and several of these may be further divided into subclasses (isotypes), e.g., IgG-1, IgG-2, IgG-3, and IgG-4; IgA-1 and IgA-2. One skilled in the art would recognize the comparable classes for mouse. The heavy chain constant domains that correspond to the different classes of immunoglobulins are called alpha, delta, epsilon, gamma, and mu, respectively.

[0074] Each antibody molecule is made up of the protein products of two genes, heavy-chain gene and light-chain gene. The heavy-chain gene is constructed through somatic recombination of V, D, and J gene segments. In humans, there are 51 VH, 27 DH, 6 JH, 9 CH gene segments on human chromosome 14. The light-chain gene is constructed through somatic recombination of V and J gene segments. There are 40 Vκ, 31 Vλ, 5 Jκ, 4 Jλ gene segments on human chromosome 14 (80 VJ). The heavy-chain constant domains that correspond to the different classes of immunoglobulins are called α, δ, ε, γ, and μ, respectively. The “light chains” of antibodies from any vertebrate species can be assigned to one of two clearly distinct types, called kappa (κ) and lambda (λ), based on the amino acid sequences of their constant domains.

[0075] The term “monoclonal antibody” as used herein refers to an antibody obtained from a substantially homogeneous population of antibodies, i.e., the individual antibodies within the population are identical except for possible naturally occurring mutations that may be present in a small subset of the antibody molecules. The monoclonal antibodies herein specifically include “chimeric” antibodies in which a portion of the heavy and/or light chain is identical with or homologous to corresponding sequences in antibodies derived from a particular species or belonging to a particular antibody class or subclass, while the remainder of the chain(s) is identical with or homologous to corresponding sequences in antibodies derived from another species or belonging to another antibody class or subclass, as well as fragments of such antibodies, as long as they exhibit the desired antagonistic activity.

[0076] The disclosed monoclonal antibodies can be made using any procedure which produces monoclonal antibodies. For example, disclosed monoclonal antibodies can be prepared using hybridoma methods, such as those described by Kohler and Milstein, Nature, 256:495 (1975). In a hybridoma method, a mouse or other appropriate host animal is typically immunized with an immunizing agent to elicit lymphocytes that produce or are capable of producing antibodies that will specifically bind to the immunizing agent. Alternatively, the lymphocytes may be immunized in vitro.

[0077] The monoclonal antibodies may also be made by recombinant DNA methods. DNA encoding the disclosed monoclonal antibodies can be readily isolated and sequenced using conventional procedures (e.g., by using oligonucleotide probes that are capable of binding specifically to genes encoding the heavy and light chains of murine antibodies). Libraries of antibodies or active antibody fragments can also be generated and screened using phage display techniques, e.g., as described in U.S. Pat. No. 5,804,440 to Burton et al. and U.S. Pat. No. 6,096,441 to Barbas et al.

[0078] In vitro methods are also suitable for preparing monovalent antibodies. Digestion of antibodies to produce fragments thereof, particularly, Fab fragments, can be accomplished using routine techniques known in the art. For instance, digestion can be performed using papain. Examples of papain digestion are described in WO 94/29348 published Dec. 22, 1994 and U.S. Pat. No. 4,342,566. Papain digestion of antibodies typically produces two identical antigen binding fragments, called Fab fragments, each with a single antigen binding site, and a residual Fc fragment. Pepsin treatment yields a fragment that has two antigen combining sites and is still capable of cross linking antigen.

[0079] As used herein, the term “antibody or antigen binding fragment thereof” or “antibody or fragments thereof” encompasses chimeric antibodies and hybrid antibodies, with dual or multiple antigen or epitope specificities, and fragments, such as F(ab′)₂, Fab′, Fab, Fv, sFv, scFv and the like, including hybrid fragments. Thus, fragments of the antibodies that retain the ability to bind their specific antigens are provided. For example, fragments of antibodies which maintain HIV virus binding activity are included within the meaning of the term “antibody or antigen binding fragment thereof.” Such antibodies and fragments can be made by techniques known in the art and can be screened for specificity and activity according to the methods set forth in the Examples and in general methods for producing antibodies and screening antibodies for specificity and activity (See Harlow and Lane. Antibodies, A Laboratory Manual. Cold Spring Harbor Publications, New York, (1988)).

[0080] Also included within the meaning of “antibody or antigen binding fragment thereof” are conjugates of antibody fragments and antigen binding proteins (single chain antibodies). Also included within the meaning of “antibody or antigen binding fragment thereof” are immunoglobulin single variable domains, such as for example a nanobody.

[0081] The fragments, whether attached to other sequences or not, can also include insertions, deletions, substitutions, or other selected modifications of particular regions or specific amino acids residues, provided the activity of the antibody or antibody fragment is not significantly altered or impaired compared to the non-modified antibody or antibody fragment. These modifications can provide for some additional property, such as to remove/add amino acids capable of disulfide bonding, to increase its bio-longevity, to alter its secretory characteristics, etc. In any case, the antibody or antibody fragment must possess a bioactive property, such as specific binding to its cognate antigen. Functional or active regions of the antibody or antibody fragment may be identified by mutagenesis of a specific region of the protein, followed by expression and testing of the expressed polypeptide. Such methods are readily apparent to a skilled practitioner in the art and can include site-specific mutagenesis of the nucleic acid encoding the antibody or antibody fragment. (Zoller, M. J. Curr. Opin. Biotechnol. 3:348-354, 1992).

[0082] As used herein, the term “antibody” or “antibodies” can also refer to a human antibody and/or a humanized antibody. Many non-human antibodies (e.g., those derived from mice, rats, or rabbits) are naturally antigenic in humans, and thus can give rise to undesirable immune responses when administered to humans. Therefore, the use of human or humanized antibodies in the methods serves to lessen the chance that an antibody administered to a human will evoke an undesirable immune response.

[0083] “Pharmaceutically acceptable” component can refer to a component that is not biologically or otherwise undesirable, i.e., the component may be incorporated into a pharmaceutical formulation of the invention and administered to a subject as described herein without causing significant undesirable biological effects or interacting in a deleterious manner with any of the other components of the formulation in which it is contained. When used in reference to administration to a human, the term generally implies the component has met the required standards of toxicological and manufacturing testing or that it is included on the Inactive Ingredient Guide prepared by the U.S. Food and Drug Administration.

[0084] “Pharmaceutically acceptable carrier” (sometimes referred to as a “carrier”) means a carrier or excipient that is useful in preparing a pharmaceutical or therapeutic composition that is generally safe and non-toxic, and includes a carrier that is acceptable for veterinary and/or human pharmaceutical or therapeutic use. The terms “carrier” or “pharmaceutically acceptable carrier” can include, but are not limited to, phosphate buffered saline solution, water, emulsions (such as an oil/water or water/oil emulsion) and/or various types of wetting agents.

[0085] As used herein, the terms “treating” or “treatment” of a subject includes the administration of a drug to a subject with the purpose of curing, healing, alleviating, relieving, altering, remedying, ameliorating, improving, stabilizing or affecting a disease or disorder, or a symptom of a disease or disorder. The terms “treating” and “treatment” can also refer to reduction in severity and/or frequency of symptoms, elimination of symptoms and/or underlying cause, and improvement or remediation of damage.

[0086] “Therapeutically effective amount” or “therapeutically effective dose” of a composition refers to an amount that is effective to achieve a desired therapeutic result. Therapeutically effective amounts of a given therapeutic agent will typically vary with respect to factors such as the type and severity of the disorder or disease being treated and the age, gender, and weight of the subject. The term can also refer to an amount of a therapeutic agent, or a rate of delivery of a therapeutic agent (e.g., amount over time), effective to facilitate a desired therapeutic effect, such as coughing relief. The precise desired therapeutic effect will vary according to the condition to be treated, the tolerance of the subject, the agent and/or agent formulation to be administered (e.g., the potency of the therapeutic agent, the concentration of agent in the formulation, and the like), and a variety of other factors that are appreciated by those of ordinary skill in the art. In some instances, a desired biological or medical response is achieved following administration of multiple dosages of the composition to the subject over a period of days, weeks, or years.

### Methods

[0087] In some aspects, disclosed herein is a method for simultaneous detection of an antigen and an antibody that specifically binds said antigen, comprising:
[0088] labeling a plurality of antigens with unique antigen barcodes;
[0089] providing a plurality of barcode-labeled antigens to a population of B-cells;
[0090] allowing the plurality of barcode-labeled antigens to bind to the population of B-cells;
[0091] washing unbound antigens from the population of B-cells;
[0092] separating the B-cells into single cell emulsions;
[0093] introducing into each single cell emulsion a unique cell barcode-labeled bead;
[0094] preparing a single cell cDNA library from the single cell emulsions;
[0095] performing PCR amplification reactions to produce a plurality of amplicons, wherein the amplicons comprise: 1) the cell barcode and the antigen barcode, 2) the cell barcode and an antibody sequence, and 3) a unique molecular identifier (UMI);
[0096] sequencing the plurality of amplicons;
[0097] removing a sequence lacking the cell barcode, the UMI, or the antigen barcode;
[0098] aligning the antibody sequence to a reference library of immunoglobulin V, D, J and C sequences;
[0099] constructing a UMI count matrix comprising the cell barcode, the antigen barcode, and the antibody sequence;
[0100] determining a LIBRA-seq score; and
[0101] determining that the antibody specifically binds an antigen if the LIBRA-seq score of the antibody for the antigen is increased in comparison to a control sample.

[0102] Following a LIBRA-seq experiment, there are 2 resulting pairs of FASTQ files: (1) B cell receptor libraries (containing heavy and light chain contigs), and (2) antigen barcode libraries (containing antigen-identifying DNA barcode sequences from the antigen screening library). In some embodiments, it should be understood that the methods described herein are for uniting the information from these two sequencing libraries. Accordingly, in some embodiments, the above noted step of removing a sequence lacking the cell barcode, the UMI, or the antigen barcode is for removing a sequence from the antigen barcode library lacking the cell barcode, the UMI, or the antigen barcode. The general structure of the antigen barcode should be look like, for example, FIG. 1 disclosed herein. The methods describe here are for processing the antigen barcodes. The processing serves two purposes: (1) quality control and annotation of sequenced reads, and (2) identification of binding signal from the annotated sequenced reads. Before the following steps are carried out, the BCR libraries are processed in order to determine the list of cell barcodes that have a VDJ sequence.

[0103] Processing of antigen barcode reads and BCR sequence contigs. A pipeline shown herein takes paired-end fastq files of oligo libraries as input, processes and annotates reads for cell barcode, UMI, and antigen barcode, and generates a cell barcode—antigen barcode UMI count matrix. BCR contigs are processed using cellranger (10× Genomics) using GRCh38 as reference. For the antigen barcode libraries, initial quality and length filtering is carried out by fastp (Chen et al., 2018) using default parameters for filtering. This results in only high-quality reads being retained in the antigen barcode library (FIG. 11). In a histogram of insert lengths, this results in a sharp peak of the expected insert size of 52-54 (FIG. 9B-9C). Fastx_collapser is then used to group identical sequences and convert the output to deduplicated fasta files. Then, having removed low-quality reads, just the R2 sequences were processed, as the entire insert is present in both R1 and R2. Each unique R2 sequence (or R1, or the consensus of R1 and R2) was processed one by one using the following steps:

[0104] (1) The reverse complement of the R2 sequence is determined (Skip step 1 if using R1).

[0105] (2) The sequence is screened for possessing an exact match to any of the valid 10× cell barcodes present in the filtered_contig.fasta file output by cell ranger during processing of BCR V(D)J fastq files. Sequences without a BCR-associated cell barcode are discarded.

[0106] (3) The 10 bases immediate 3′ to the cell barcode are annotated as the read's UMI.

[0107] (4) The remainder of the sequence 3′ to the UMI is screened for a 13 or 15 bp sequence with a hamming distance of 0, 1, or 2 to any of the antigen barcodes used in the screening library. Following this processing, only sequences around the expected lengths are retained (the lengths of sequences can be from more than 1, 2, 3, 4, 5, 6, 7, 8, 9, 10, 11, 12, 13, 14, 15, 16, 17, 18, 19, 20, 21, 22, 23, 24, 25, 26, 27, 28, 29, or 30 bases shorter to more than 1, 2, 3, 4, 5, 6, 7, 8, 9, 10, 11, 12, 13, 14, 15, 16, 17, 18, 19, 20, 21, 22, 23, 24, 25, 26, 27, 28, 29, or 30 bases longer than the expected lengths), thus allowing for a deletion, an insertion outside the cell barcode, or bases flanking the cell barcode.

[0108] This general process requires that sequences possess all elements needed for analysis (cell barcode, UMI, and antigen barcode), but is permissive to insertions or deletions in the TSO region between the UMI and antigen barcode. After processing each sequence one-by-one, cell barcode—UMI—antigen barcode collisions are screened. Any cell barcode—UMI combination (indicative of a unique oligo molecule) that has multiple antigen barcodes associated with it is removed. A cell barcode—antigen barcode UMI count matrix is then constructed, which served as the basis of subsequent analysis. Additionally, the BCR contigs are aligned (filtered_contigs.fasta file output by Cellranger, 10× Genomics) to IMGT reference genes using HighV-Quest (Alamyar et al., 2012). The output of HighV-Quest is parsed using ChangeO (Gupta et al., 2015), and merged with the UMI count matrix.

[0109] The above stated procedure can be summarized as the following steps:

[0110] 1) Remove low quality reads;

[0111] 2) Remove reads too long or too short to be a valid antigen barcode read containing a cell barcode, UMI, and antigen barcode;

[0112] 3) For each quality read, annotate:
[0113] a. Cell barcode,
[0114] b. UMI
[0115] c. Antigen barcode, allowing for sequencing/PCR errors by using a hamming distance threshold.

[0116] Determination of LIBRA-seq Score. Starting with the UMI count matrix, all counts of more than one UMIs (for example, more than 1, 2, 3, 4, 5, 6, 7, 8, 9, 10, 11, 12, 13, 14, 15, 16, 17, 18, 19, 20 UMIs) were set to 0, with the idea that these low counts can be attributed to noise. After this, the UMI count matrix was subset to contain only cells with a count of one or more UMIs than the minimum value in the above noted step of noise filtering for at least 1 antigen. The centered-log ratios (CLR) of each antigen UMI count for each cell were then calculated (Mimitou et al., 2019; Stoeckius et al., 2017, 2018). Because UMI counts were on different scales for each antigen, due to differential oligo loading during oligo-antigen conjugation, the CLRs UMI counts were rescaled using the StandardScaler method in scikit learn (Pedregosa and Varoquaux, 2011). Lastly, A correction procedure was performed to the z-score-normalized CLRs from UMI counts of 0, setting them to the minimum for each antigen for donor NIAID 45 and N90 experiments, and to −1 for the Ramos B cell line experiment. These CLR-transformed, Z-score-normalized, corrected values served as the final LIBRA-seq scores. LIBRA-seq scores were visualized using Cytobank (Kotecha et al., 2010).

[0117] Identification of sequence feature—antigen specificity associations. Following determination of LIBRA-seq scores (above), and because antibody sequence is united with antigen specificity (in the form of a LIBRA-seq score), sequence-specificity associations can be made.

[0118] Accordingly, in some embodiments, the method of any preceding aspect further comprises determining a level of somatic hypermutation of the antibody specifically binding to the antigen

[0119] In some embodiments, the method of any preceding aspect further comprises determining a length of a complementarity-determining region (CDR) of the antibody specifically binding to the antigen. The term “complementarity determining region (CDR)” used herein refers to an amino acid sequence of an antibody variable region of a heavy chain or light chain. CDRs are necessary for antigen binding and determine the specificity of an antibody. Each variable region typically has three CDRs identified as CDR1 (CDRH1 or CDRL1, where “H” indicates the heavy chain CDR1 and “L” indicates the light chain CDR1), CDR2 (CDRH2 or CDRL2), and CDR3 (CDRH3 or CDRL3). The CDRs may provide contact residues that play a major role in the binding of antibodies to antigens or epitopes. Four framework regions, which have more highly conserved amino acid sequences than the CDRs, separate the CDR regions in the VH or VL.

[0120] Accordingly, in some embodiments, the method of any preceding aspect further comprises determining a motif of a CDR of the antibody specifically binding to the antigen. In some embodiments, the CDR is selected from the group consisting of CDRH1, CDRH2, CDRH3, CDRL1, CDRL2, and CDRL3.

[0121] In some embodiments, the method of any preceding aspect further comprises identification of IGHV, IGHD, IGHJ, IGKV, IGKJ, IGLV, or IGLJ genes, or combinations thereof, associated with any particular combination of antigen specificities.

[0122] In some embodiments, the method of any preceding aspect further comprises identification of mutations in heavy or light FW1, FW2, FW3 or FW4 associated with any particular combination of antigen specificities.

[0123] In some embodiments, the method of any preceding aspect further comprises identification of overall gene expression profiles or select up- or down-regulated genes associated with any particular combination of antigen specificities.

[0124] In some embodiments, the method of any preceding aspect further comprises identification of surface markers, via, for example, fluorescence-activated cell sorting, or oligo-conjugated antibodies associated with any particular combination of antigen specificities

[0125] In some embodiments, the method of any preceding aspect further comprises identification of any combination of BCR sequence feature (for example, immunoglobulin gene, sequence motif, or CDR length), gene expression profile, or surface marker profile associated with any particular combination of antigen specificities.

[0126] In some embodiments, the method of any preceding aspect further comprises training a machine learning algorithm on sequence features, sequence motifs, or encoded sequence properties (such as via Kidera factors), associated with any particular combination of antigen specificities for subsequent application to sequenced antibodies lacking antigen specificity information due to not using LIBRA-seq or otherwise.

[0127] In some aspects, disclosed herein is a method for simultaneous detection of an antigen and an antibody that specifically binds said antigen, comprising:
[0128] labeling a plurality of antigens with unique antigen barcodes;
[0129] providing a plurality of barcode-labeled antigens to a population of B-cells;
[0130] allowing the plurality of barcode-labeled antigens to bind to the population of B-cells;
[0131] washing unbound antigens from the population of B-cells;
[0132] separating the B-cells into single cell emulsions;
[0133] introducing into each single cell emulsion a unique cell barcode-labeled bead;
[0134] preparing a single cell cDNA library from the single cell emulsions;
[0135] performing PCR amplification reactions to produce a plurality of amplicons, wherein the amplicons comprise: 1) the cell barcode and the antigen barcode, 2) the cell barcode and an antibody sequence, and 3) a unique molecular identifier (UMI);
[0136] sequencing the plurality of amplicons;
[0137] removing a sequence lacking the cell barcode, the UMI, or the antigen barcode;
[0138] aligning the antibody sequence to a reference library of immunoglobulin V, D, J and C sequences;
[0139] constructing a UMI count matrix comprising the cell barcode, the antigen barcode, and the antibody sequence;
[0140] determining a LIBRA-seq score; and
[0141] determining that the antibody specifically binds an antigen if the LIBRA-seq score of the antibody for the antigen is increased in comparison to a control sample.

[0142] In some embodiments, the barcode-labeled antigens are labeled with a first barcode comprising a DNA sequence or an RNA sequence. In some embodiments, the cell barcode-labeled beads are labeled with a second barcode comprising a DNA sequence or an RNA sequence.

[0143] It should be understood that the barcode described above is conjugated to the barcode-labeled antigen in a way that are known to one of ordinary skill in the art. Conjugates can be chemically linked to the nucleotide or nucleotide analogs. Such conjugates include but are not limited to lipid moieties such as a cholesterol moiety (Letsinger et al., Proc. Natl. Acad. Sci. USA, 1989, 86, 6553-6556), cholic acid (Manoharan et al., Bioorg. Med. Chem. Let., 1994, 4, 1053-1060), a thioether, e.g., hexyl-S-tritylthiol (Manoharan et al., Ann. N.Y. Acad. Sci., 1992, 660, 306-309; Manoharan et al., Bioorg. Med. Chem. Let., 1993, 3, 2765-2770), a thiocholesterol (Oberhauser et al., Nucl. Acids Res., 1992, 20, 533-538), an aliphatic chain, e.g., dodecandiol or undecyl residues (Saison-Behmoaras et al., EMBO J., 1991, 10, 1111-1118; Kabanov et al., FEBS Lett., 1990, 259, 327-330; Svinarchuk et al., Biochimie, 1993, 75, 49-54), a phospholipid, e.g., di-hexadecyl-rac-glycerol or triethylammonium 1,2-di-O-hexadecyl-rac-glycero-3-H-phosphonate (Manoharan et al., Tetrahedron Lett., 1995, 36, 3651-3654; Shea et al., Nucl. Acids Res., 1990, 18, 3777-3783), a polyamine or a polyethylene glycol chain (Manoharan et al., Nucleosides & Nucleotides, 1995, 14, 969-973), or adamantane acetic acid (Manoharan et al., Tetrahedron Lett., 1995, 36, 3651-3654), a palmityl moiety (Mishra et al., Biochim. Biophys. Acta, 1995, 1264, 229-237), or an octadecylamine or hexylamino-carbonyl-oxycholesterol moiety (Crooke et al., J. Pharmacol. Exp. Ther., 1996, 277, 923-937. An oligonucleotide barcode can also be conjugated to an antigen using the Solulink Protein-Oligonucleotide Conjugation Kit (TriLink cat no. S-9011) according to manufacturer's instructions. Briefly, the oligo and protein are desalted, and then the amino-oligo is modified with the 4FB crosslinker, and the biotinylated antigen protein is modified with S-HyNic. Then, the 4FB-oligo and the HyNic-antigen are mixed together. This causes a stable bond to form between the protein and the oligonucleotide. In some embodiments, the cell barcode-labeled beads are labeled with a second barcode comprising a DNA sequence or an RNA sequence. In some embodiments, the cell barcode-labeled beads are labeled with a second barcode comprising a DNA sequence. In some embodiments, the cell barcode-labeled beads are labeled with a second barcode comprising an RNA sequence. In some embodiments, the cell barcode-labeled beads are labeled with a barcode on the inside of the bead. In some embodiments, the cell barcode-labeled beads are labeled with a barcode encapsulated within the bead. In some embodiments, the cell barcode-labeled beads are labeled with a barcode on the outside of the bead.

[0144] As used herein, “beads” is not limited to a specific type of bead. Rather, a large number of beads are available and are known to one of ordinary skill in the art. A suitable bead may be selected on the basis of the desired end use and suitability for various protocols. In some embodiments, the bead is or comprises a particle or a bead. In some embodiments, the solid support bead is magnetic. Beads comprise particles have been described in the prior art in, for example, U.S. Pat. Nos. 5,084,169, 5,079,155, 473,231, and 8,110,351. The particle or bead size can be optimized for binding B cell in a single cell emulsion and optimized for the subsequent PCR reaction.

[0145] These oligos, which contain the cell barcode, both: (1) enable amplification of cellular mRNA transcripts through the template switch oligo that is part of the oligo containing the cell barcode, and (2) directly anneal to the antigen barcode-containing oligos from the antigen. In some embodiments, the oligos delivered from the beads have the general structure: P5_PCR_handle-Cell_barcode-UMI-Template_switch_oligo.

[0146] It is noted above that the antibody is determined as specifically binding an antigen if the LIBRA-seq score of the antibody for the antigen is increased in comparison to a control sample. It should be understood herein that, as taught by FIG. 1C, between the minimum (y-axis, top) and maximum (y-axis, bottom) LIBRA-seq score for each antigen, the ability of each of 100 cutoffs was tested for its ability to classify each antibody as antigen positive or negative, where antigen positive is defined as having a LIBRA-seq score greater than or equal to the cutoff being evaluated and antigen negative is defined as having a LIBRA-seq score below the cutoff.

[0147] In some embodiments, the antibody sequence comprises an immunoglobulin heavy chain (VDJ) sequence, or an immunoglobulin light chain (VJ) sequence. In some embodiments, the antibody sequence comprises an immunoglobulin heavy chain (VDJ) sequence. In some embodiments, the antibody sequence comprises an immunoglobulin light chain (VJ) sequence.

[0148] In some embodiments, the barcode-labeled antigens comprise an antigen from a pathogen or an animal In some embodiments, the barcode-labeled antigens comprise an antigen from a pathogen. In some embodiments, the barcode-labeled antigens comprise an antigen from an animal In some embodiments, the animal is a mammal, including, but not limited to, primates (e.g., humans and nonhuman primates), cows, sheep, goats, horses, dogs, cats, rabbits, rats, mice and the like. In some embodiments, the subject is a human.

[0149] In some embodiments, the antigen from a pathogen comprises an antigen from a virus. In some embodiments, the antigen from a virus comprises an antigen from human immunodeficiency virus (HIV), an antigen from influenza virus, or an antigen from respiratory syncytial virus (RSV).

[0150] In some embodiments, the antigen from a virus comprises an antigen from human immunodeficiency virus (HIV). In some embodiments, the antigen from a virus comprises an antigen from influenza virus. In some embodiments, the antigen from a virus comprises an antigen from respiratory syncytial virus (RSV).

[0151] In some embodiments, the antigen from HIV comprises an antigen from HIV-1. In some embodiments, the antigen from HIV comprises an antigen from HIV-2. In some embodiments, the antigen from HIV comprises HIV-1 Env. In some embodiments, the antigen from influenza virus comprises hemagglutinin (HA). In some embodiments, the antigen from RSV comprises an RSV F protein. In some embodiments, the antigen is selected from the antigens listed in Table 1.

TABLE 1
Antigen screening library for human B-cell sample analysis. For a set of pathogens,
shown are selected protein targets, number of strains, and resulting total number of
antigens in the screening library.

| Pathogen | Protein targets | # Strains | # Antigens in library |
|---|---|---|---|
| CMV | g^{B} | 2 | 2 |
| D [symbol] ngue | E, prM | 6 | 10 |
| Hepatitis B | HBsAg | 2 | 2 |
| Hepatitis C | E2, E1E2 | 2 | 4 |
| HIV-1 | gp140, gp120, MPER | 3 | 9 |
| HPV | L1 | 3 | 3 |
| HSV-1 | g^{B} | 1 | 1 |
| influenza | HA [symbol] NA | [symbol] | 12 |
| Malaria | PfCSP | 1 | 1 |
| Measles | H, F | 1 | 2 |
| Mumps | HN, NP | 1 | 2 |
| Norovirus | P | 10 | 10 |
| Rhinovius | VP1 | 5 | 5 |
| Rotavirus | VP7, VP4 | [symbol] | 8 |
| RSV | F [symbol] G | 4 | 8 |
| Rub [symbol] a | E1 | 1 | 1 |
| Staphylococcus aureus | HtsA, SirA, IsdB, SstD | 1 | 4 |
| UPEC | Hma, IutA, FyuA, IreA | 1 | 4 |
| Z [symbol] ka | E [symbol] prM | 1 | 2 |

*influenza: A (6 HA, 4 NA) and B (2 HA); \hat{ }rotavirus: 6 G, 2 P variants) [symbol]
indicates data missing or illegible when filed

[0152] In some embodiments, the population of B-cells comprise a memory B-cell, a plasma cell, a naïve B cell, an activated B-cell, or a B-cell line. In some embodiments, the population of B-cells comprise a memory B-cell, a plasma cell, a naïve B cell, an activated B-cell, or a B-cell line. In some embodiments, the population of B-cells comprise a plasma cell. In some embodiments, the population of B-cells comprise a naïve B cell. In some embodiments, the population of B-cells comprise an activated B-cell. In some embodiments, the population of B-cells comprise a B-cell line.

[0153] In another aspect, disclosed herein is a method of determining a broadly neutralizing antibody to a pathogen, said method comprising:
[0154] labeling a plurality of antigens derived from the pathogen with unique antigen barcodes;
[0155] providing a plurality of barcode-labeled antigens to a population of B-cells;
[0156] allowing the plurality of barcode-labeled antigens to bind to the population of B-cells;
[0157] washing unbound antigens from the population of B-cells;
[0158] separating the B-cells into single cell emulsions;
[0159] introducing into each single cell emulsion a unique cell barcode-labeled bead;
[0160] preparing a single cell cDNA library from the single cell emulsions;
[0161] performing PCR amplification reactions to produce a plurality of amplicons, wherein the amplicons comprise: 1) the cell barcode and the antigen barcode, 2) the cell barcode and an antibody sequence, and 3) a unique molecular identifier (UMI);
[0162] sequencing the plurality of amplicons;
[0163] removing a sequence lacking a cell barcode, unique molecular identifier (UMI), or an antigen barcode;
[0164] aligning the antibody sequence to a reference library of immunoglobulin V, D, J and C sequences;
[0165] constructing a UMI count matrix comprising the cell barcode, the antigen barcode, and the antibody sequence;
[0166] determining a LIBRA-seq score; and
[0167] determining that the antibody is a broadly neutralizing antibody if the LIBRA-seq scores of the antibody for two or more antigens are increased in comparison to a control.

[0168] Polypeptides and Polynucleotides

[0169] In some aspects, disclosed herein is a polynucleotide comprising a sequence set forth in the specification.

[0170] In some aspects, disclosed herein is a polypeptide, wherein the polypeptide is encoded by a polynucleotide sequence set forth in the specification.

[0171] In some aspects, disclosed herein is a recombinant antibody, said antibody comprising a light chain variable region (VL) and a heavy chain variable region (VH), wherein
[0172] the VH comprises an amino acid sequence at least 60% (for example, at least 60%, at least 65%, at least 70%, at least 75%, at least 80%, at least 85%, at least 90%, at least 95%, at least 96%, at least 97%, at least 98%, at least 99%) identical to SEQ ID NOs: 667-711; and/or
[0173] the VL comprises an amino acid sequence at least 60% (for example, at least 60%, at least 65%, at least 70%, at least 75%, at least 80%, at least 85%, at least 90%, at least 95%, at least 96%, at least 97%, at least 98%, at least 99%) identical to SEQ ID NOs: 802-845.

[0174] In some embodiments, the VH comprises at least one amino acid substitution (including, for example, at least 1, 2, 3, 4, 5, 6, 7, 8, 9, 10, 11, 12, 13, 14, 15, or 16 substitutions) when compared to SEQ ID NOs: 667-711. In some embodiments, the VL comprises at least one amino acid substitution (including, for example, at least 1, 2, 3, 4, 5, 6, 7, 8, 9, 10, 11, 12, 13, 14, 15, or 16 substitutions) when compared to SEQ ID NOs: 802-845.

[0175] In some aspects, disclosed herein is a recombinant antibody, said antibody comprising a light chain variable region (VL) that comprises a light chain complementarity determining region (CDRL)1, CDRL2, and CDRL3 and a heavy chain variable region (VH) that comprises a heavy chain complementarity determining region (CDRH)1, CDRH2, and CDRH3, wherein
[0176] the CDRH1 comprises an amino acid sequence at least 60% (for example, at least 60%, at least 65%, at least 70%, at least 75%, at least 80%, at least 85%, at least 90%, at least 95%, at least 96%, at least 97%, at least 98%, at least 99%) identical to SEQ ID NOs: 712-740; and/or
[0177] the CDRL1 comprises an amino acid sequence at least 60% (for example, at least 60%, at least 65%, at least 70%, at least 75%, at least 80%, at least 85%, at least 90%, at least 95%, at least 96%, at least 97%, at least 98%, at least 99%) identical to SEQ ID NOs: 846-876.

[0178] In some aspects, disclosed herein is a recombinant antibody, said antibody comprising a light chain variable region (VL) that comprises a light chain complementarity determining region (CDRL)1, CDRL2, and CDRL3 and a heavy chain variable region (VH) that comprises a heavy chain complementarity determining region (CDRH)1, CDRH2, and CDRH3, wherein
[0179] the CDRH2 comprises an amino acid sequence at least 60% (for example, at least 60%, at least 65%, at least 70%, at least 75%, at least 80%, at least 85%, at least 90%, at least 95%, at least 96%, at least 97%, at least 98%, at least 99%) identical to SEQ ID NOs: 741-767; and/or
[0180] the CDRL2 comprises an amino acid sequence at least 60% (for example, at least 60%, at least 65%, at least 70%, at least 75%, at least 80%, at least 85%, at least 90%, at least 95%, at least 96%, at least 97%, at least 98%, at least 99%) identical to SEQ ID NOs: 877-891.

[0181] In some aspects, disclosed herein is a recombinant antibody, said antibody comprising a light chain variable region (VL) that comprises a light chain complementarity determining region (CDRL)1, CDRL2, and CDRL3 and a heavy chain variable region (VH) that comprises a heavy chain complementarity determining region (CDRH)1, CDRH2, and CDRH3, wherein
[0182] the CDRH3 comprises an amino acid sequence at least 60% (for example, at least 60%, at least 65%, at least 70%, at least 75%, at least 80%, at least 85%, at least 90%, at least 95%, at least 96%, at least 97%, at least 98%, at least 99%) identical to SEQ ID NOs: 768-801 or 917-936; and/or
[0183] the CDRL3 comprises an amino acid sequence at least 60% (for example, at least 60%, at least 65%, at least 70%, at least 75%, at least 80%, at least 85%, at least 90%, at least 95%, at least 96%, at least 97%, at least 98%, at least 99%) identical to SEQ ID NOs: 892-916 or 937-938.

[0184] In some aspects, disclosed herein is a recombinant antibody, said antibody comprising a light chain variable region (VL) that comprises a light chain complementarity determining region (CDRL)1, CDRL2, and CDRL3 and a heavy chain variable region (VH) that comprises a heavy chain complementarity determining region (CDRH)1, CDRH2, and CDRH3, wherein
[0185] the CDRH1 comprises an amino acid sequence at least 60% (for example, at least 60%, at least 65%, at least 70%, at least 75%, at least 80%, at least 85%, at least 90%, at least 95%, at least 96%, at least 97%, at least 98%, at least 99%) identical to SEQ ID NOs: 712-740;
[0186] the CDRL1 comprises an amino acid sequence at least 60% (for example, at least 60%, at least 65%, at least 70%, at least 75%, at least 80%, at least 85%, at least 90%, at least 95%, at least 96%, at least 97%, at least 98%, at least 99%) identical to SEQ ID NOs: 846-876;
[0187] the CDRH2 comprises an amino acid sequence at least 60% (for example, at least 60%, at least 65%, at least 70%, at least 75%, at least 80%, at least 85%, at least 90%, at least 95%, at least 96%, at least 97%, at least 98%, at least 99%) identical to SEQ ID NOs: 741-767;
[0188] the CDRL2 comprises an amino acid sequence at least 60% (for example, at least 60%, at least 65%, at least 70%, at least 75%, at least 80%, at least 85%, at least 90%, at least 95%, at least 96%, at least 97%, at least 98%, at least 99%) identical to SEQ ID NOs: 877-891;
[0189] the CDRH3 comprises an amino acid sequence at least 60% (for example, at least 60%, at least 65%, at least 70%, at least 75%, at least 80%, at least 85%, at least 90%, at least 95%, at least 96%, at least 97%, at least 98%, at least 99%) identical to SEQ ID NOs: 768-801 or 917-936; and/or
[0190] the CDRL3 comprises an amino acid sequence at least 60% (for example, at least 60%, at least 65%, at least 70%, at least 75%, at least 80%, at least 85%, at least 90%, at least 95%, at least 96%, at least 97%, at least 98%, at least 99%) identical to SEQ ID NOs: 892-916 or 937-938.

[0191] In some embodiments, the CDRH1 comprises at least one amino acid substitution (including, for example, at least 1, 2, 3, 4, 5, or 6 substitutions) when compared to SEQ ID NOs: 712-740. In some embodiments, the CDRH2 comprises at least one amino acid substitution (including, for example, at least 1, 2, 3, 4, 5, or 6 substitutions) when compared to SEQ ID NOs: 741-767. In some embodiments, the CDRH3 comprises at least one amino acid substitution (including, for example, at least 1, 2, 3, 4, 5, or 6 substitutions) when compared to SEQ ID Nos: 768-801 or 917-936. In some embodiments, the CDRH3 comprises at least one amino acid substitution (including, for example, at least 1, 2, 3, 4, 5, or 6 substitutions) when compared to SEQ ID NO: 770. In some embodiments, the CDRH3 comprises at least one amino acid substitution (including, for example, at least 1, 2, 3, 4, 5, or 6 substitutions) when compared to SEQ ID NO: 771. In some embodiments, the CDRH3 comprises at least one amino acid substitution (including, for example, at least 1, 2, 3, 4, 5, or 6 substitutions) when compared to SEQ ID NO: 917. In some embodiments, the CDRH3 comprises at least one amino acid substitution (including, for example, at least 1, 2, 3, 4, 5, or 6 substitutions) when compared to SEQ ID NO: 918. In some embodiments, the CDRH3 comprises at least one amino acid substitution (including, for example, at least 1, 2, 3, 4, 5, or 6 substitutions) when compared to SEQ ID NO: 919. In some embodiments, the CDRH3 comprises at least one amino acid substitution (including, for example, at least 1, 2, 3, 4, 5, or 6 substitutions) when compared to SEQ ID NO: 920. In some embodiments, the CDRH3 comprises at least one amino acid substitution (including, for example, at least 1, 2, 3, 4, 5, or 6 substitutions) when compared to SEQ ID NO: 921. In some embodiments, the CDRH3 comprises at least one amino acid substitution (including, for example, at least 1, 2, 3, 4, 5, or 6 substitutions) when compared to SEQ ID NO: 922. In some embodiments, the CDRH3 comprises at least one amino acid substitution (including, for example, at least 1, 2, 3, 4, 5, or 6 substitutions) when compared to SEQ ID NO: 923. In some embodiments, the CDRH3 comprises at least one amino acid substitution (including, for example, at least 1, 2, 3, 4, 5, or 6 substitutions) when compared to SEQ ID NO: 924. In some embodiments, the CDRH3 comprises at least one amino acid substitution (including, for example, at least 1, 2, 3, 4, 5, or 6 substitutions) when compared to SEQ ID NO: 925. In some embodiments, the CDRH3 comprises at least one amino acid substitution (including, for example, at least 1, 2, 3, 4, 5, or 6 substitutions) when compared to SEQ ID NO: 926. In some embodiments, the CDRH3 comprises at least one amino acid substitution (including, for example, at least 1, 2, 3, 4, 5, or 6 substitutions) when compared to SEQ ID NO: 927. In some embodiments, the CDRH3 comprises at least one amino acid substitution (including, for example, at least 1, 2, 3, 4, 5, or 6 substitutions) when compared to SEQ ID NO: 928. In some embodiments, the CDRH3 comprises at least one amino acid substitution (including, for example, at least 1, 2, 3, 4, 5, or 6 substitutions) when compared to SEQ ID NO: 929. In some embodiments, the CDRH3 comprises at least one amino acid substitution (including, for example, at least 1, 2, 3, 4, 5, or 6 substitutions) when compared to SEQ ID NO: 930. In some embodiments, the CDRH3 comprises at least one amino acid substitution (including, for example, at least 1, 2, 3, 4, 5, or 6 substitutions) when compared to SEQ ID NO: 931. In some embodiments, the CDRH3 comprises at least one amino acid substitution (including, for example, at least 1, 2, 3, 4, 5, or 6 substitutions) when compared to SEQ ID NO: 932. In some embodiments, the CDRH3 comprises at least one amino acid substitution (including, for example, at least 1, 2, 3, 4, 5, or 6 substitutions) when compared to SEQ ID NO: 933. In some embodiments, the CDRH3 comprises at least one amino acid substitution (including, for example, at least 1, 2, 3, 4, 5, or 6 substitutions) when compared to SEQ ID NO: 934. In some embodiments, the CDRH3 comprises at least one amino acid substitution (including, for example, at least 1, 2, 3, 4, 5, or 6 substitutions) when compared to SEQ ID NO: 935. In some embodiments, the CDRH3 comprises at least one amino acid substitution (including, for example, at least 1, 2, 3, 4, 5, or 6 substitutions) when compared to SEQ ID NO: 936. In some embodiments, the CDRH3 comprises a polypeptide sequence selected from SEQ ID NOs: 770-771 or 917-936.

[0192] In some embodiments, the CDRL1 comprises at least one amino acid substitution (including, for example, at least 1, 2, 3, 4, 5, or 6 substitutions) when compared to SEQ ID NOs: 846-876. In some embodiments, the CDRL2 comprises at least one amino acid substitution (including, for example, at least 1, 2, 3, 4, 5, or 6 substitutions) when compared to SEQ ID NOs: 877-891. In some embodiments, the CDRL3 comprises at least one amino acid substitution (including, for example, at least 1, 2, 3, 4, 5, or 6 substitutions) when compared to SEQ ID NOs: 892-916 or 937-938. In some embodiments, the CDRL3 comprises at least one amino acid substitution (including, for example, at least 1, 2, 3, 4, 5, or 6 substitutions) when compared to SEQ ID NO: 894. In some embodiments, the CDRL3 comprises at least one amino acid substitution (including, for example, at least 1, 2, 3, 4, 5, or 6 substitutions) when compared to SEQ ID NO: 895. In some embodiments, the CDRL3 comprises at least one amino acid substitution (including, for example, at least 1, 2, 3, 4, 5, or 6 substitutions) when compared to SEQ ID NO: 896. In some embodiments, the CDRL3 comprises at least one amino acid substitution (including, for example, at least 1, 2, 3, 4, 5, or 6 substitutions) when compared to SEQ ID NO: 897. In some embodiments, the CDRL3 comprises at least one amino acid substitution (including, for example, at least 1, 2, 3, 4, 5, or 6 substitutions) when compared to SEQ ID NO: 902. In some embodiments, the CDRL3 comprises at least one amino acid substitution (including, for example, at least 1, 2, 3, 4, 5, or 6 substitutions) when compared to SEQ ID NO: 903. In some embodiments, the CDRL3 comprises at least one amino acid substitution (including, for example, at least 1, 2, 3, 4, 5, or 6 substitutions) when compared to SEQ ID NO: 904. In some embodiments, the CDRL3 comprises at least one amino acid substitution (including, for example, at least 1, 2, 3, 4, 5, or 6 substitutions) when compared to SEQ ID NO: 905. In some embodiments, the CDRL3 comprises at least one amino acid substitution (including, for example, at least 1, 2, 3, 4, 5, or 6 substitutions) when compared to SEQ ID NO: 906. In some embodiments, the CDRL3 comprises at least one amino acid substitution (including, for example, at least 1, 2, 3, 4, 5, or 6 substitutions) when compared to SEQ ID NO: 907. In some embodiments, the CDRL3 comprises at least one amino acid substitution (including, for example, at least 1, 2, 3, 4, 5, or 6 substitutions) when compared to SEQ ID NO: 908. In some embodiments, the CDRL3 comprises at least one amino acid substitution (including, for example, at least 1, 2, 3, 4, 5, or 6 substitutions) when compared to SEQ ID NO: 911. In some embodiments, the CDRL3 comprises at least one amino acid substitution (including, for example, at least 1, 2, 3, 4, 5, or 6 substitutions) when compared to SEQ ID NO: 915. In some embodiments, the CDRL3 comprises at least one amino acid substitution (including, for example, at least 1, 2, 3, 4, 5, or 6 substitutions) when compared to SEQ ID NO: 937. In some embodiments, the CDRL3 comprises at least one amino acid substitution (including, for example, at least 1, 2, 3, 4, 5, or 6 substitutions) when compared to SEQ ID NO: 938. In some embodiments, the CDRL3 comprises a polypeptide sequence selected from the group consisting of SEQ ID NOs: 894-897, 902-908, 911, 915, 937, or 938.

[0193] In some aspects, disclosed herein is a recombinant antibody, said antibody comprising a heavy chain variable region (VH) that comprises a VDJ junction, wherein
[0194] the VDJ junction comprises an amino acid sequence at least 60% (for example, at least 60%, at least 65%, at least 70%, at least 75%, at least 80%, at least 85%, at least 90%, at least 95%, at least 96%, at least 97%, at least 98%, at least 99%) identical to SEQ ID NOs: 775 or 939-948.

[0195] In some aspects, disclosed herein is a recombinant antibody, said antibody comprising a light chain variable region (VL) that comprises a VJ junction, wherein
[0196] the VJ junction comprises an amino acid sequence at least 60% (for example, at least 60%, at least 65%, at least 70%, at least 75%, at least 80%, at least 85%, at least 90%, at least 95%, at least 96%, at least 97%, at least 98%, at least 99%) identical to SEQ ID NOs: 892, 893, 899, 900, 909, 910, 912, 913, 914, or 916.

[0197] In some aspects, disclosed herein is a recombinant antibody, said antibody comprising a heavy chain variable region (VH) and a light chain variable region (VL), wherein the VH comprises a VDJ junction comprising an amino acid sequence at least 60% (for example, at least 60%, at least 65%, at least 70%, at least 75%, at least 80%, at least 85%, at least 90%, at least 95%, at least 96%, at least 97%, at least 98%, at least 99%) identical to SEQ ID NOs: 775 or 939-948, and wherein the VL comprises a VJ junction comprising an amino acid sequence at least 60% (for example, at least 60%, at least 65%, at least 70%, at least 75%, at least 80%, at least 85%, at least 90%, at least 95%, at least 96%, at least 97%, at least 98%, at least 99%) identical to SEQ ID NOs: 892, 893, 899, 900, 909, 910, 912, 913, 914, or 916.

[0198] In some aspects, disclosed herein is a polypeptide comprising a sequence set forth in FIG. 2 or FIG. 3. In some aspects, disclosed herein is a recombinant antibody comprising a sequence set forth in FIG. 2 or FIG. 3.

[0199] In some aspects, disclosed herein is a recombinant antibody, said antibody comprising a heavy chain variable region (VH) that is encoded by a polynucleotide at least 60% (for example, at least 60%, at least 65%, at least 70%, at least 75%, at least 80%, at least 85%, at least 90%, at least 95%, at least 96%, at least 97%, at least 98%, at least 99%) identical to SEQ ID NOs: 223-444.

[0200] In some aspects, disclosed herein is a recombinant antibody, said antibody comprising a light chain variable region (VL) that is encoded by a polynucleotide at least 60% (for example, at least 60%, at least 65%, at least 70%, at least 75%, at least 80%, at least 85%, at least 90%, at least 95%, at least 96%, at least 97%, at least 98%, at least 99%) identical to SEQ ID NOs: 445-666.

[0201] In some aspects, disclosed herein is a recombinant antibody, said antibody comprising a heavy chain variable region (VH) and a light chain variable region (VL), wherein the VH is encoded by a polynucleotide at least 60% (for example, at least 60%, at least 65%, at least 70%, at least 75%, at least 80%, at least 85%, at least 90%, at least 95%, at least 96%, at least 97%, at least 98%, at least 99%) identical to SEQ ID NOs: 223-444, and wherein the VL is encoded by a polynucleotide at least 60% (for example, at least 60%, at least 65%, at least 70%, at least 75%, at least 80%, at least 85%, at least 90%, at least 95%, at least 96%, at least 97%, at least 98%, at least 99%) identical to SEQ ID NOs: 445-666.

[0202] In some aspects, disclosed herein is a therapeutic antibody comprising the polypeptide of any preceding aspect. The term “neutralizing antibody” is any antibody or antigen-binding fragment thereof that binds to a pathogen and interferes with the ability of the pathogen to infect a cell and/or cause disease in a subject. Typically, the neutralizing antibodies used in the method of the present disclosure bind to the surface of the pathogen and inhibit or reduce infection by the pathogen by at least 99 percent, at least 95 percent, at least 90 percent, at least 85 percent, at least 80 percent, at least 75 percent, at least 70 percent, at least 60 percent, at least 50 percent, at least 45 percent, at least 40 percent, at least 35 percent, at least 30 percent, at least 25 percent, at least 20 percent, or at least 10 percent relative to infection by the pathogen (e.g., HIV or influenza) in the absence of said antibody(ies) or in the presence of a negative control.

[0203] In some embodiments, the neutralizing antibody comprises a polypeptide sequence set forth in the specification. In some embodiments, the neutralizing antibody comprises 3602-870, or a polypeptide sequence having at or greater than about 80%, about 85%, about 90%, about 95%, or about 98% homology with the sequence of 3602-870, or a polypeptide comprising a portion of 3602-870. As used herein, “broadly neutralizing antibody” or “BNAb” is understood as an antibody obtained by any method that when delivered at an effective dose can be used as a therapeutic agent for the prevention or treatment of HIV or influenza infection or an infection-related disease against a broad array of different HIV or influenza strains (for example, more than 3 strains of HIV/influenza, preferably more than 4, 5, 6, 7, 8, 9, 10, 11, 12, 13, 14, 15, 16, 17, 18, 19, 20, or more strains of HIV/influenza). In some embodiments, the broadly neutralizing antibody comprises a polypeptide sequence set forth in the specification. In some embodiments, the neutralizing antibody comprises 3602-870, or a polypeptide sequence having at or greater than about 80%, about 85%, about 90%, about 95%, or about 98% homology with the sequence of 3602-870, or a polypeptide comprising a portion of 3602-870.

[0204] Accordingly, in some embodiments, the neutralizing antibody comprises a VH and a VL, wherein the VH comprises a polypeptide sequence at least 60% (for example, at least 60%, at least 65%, at least 70%, at least 75%, at least 80%, at least 85%, at least 90%, at least 95%, at least 96%, at least 97%, at least 98%, at least 99%) to SEQ ID NO: 685, and wherein the VL comprises a polypeptide sequence at least 60% (for example, at least 60%, at least 65%, at least 70%, at least 75%, at least 80%, at least 85%, at least 90%, at least 95%, at least 96%, at least 97%, at least 98%, at least 99%) to SEQ ID NO: 813. In some embodiments, the neutralizing antibody comprises a VH comprising a CDRH1, CDRH2, and CDRH3, wherein the CDRH1 comprises a polypeptide sequence at least 60% (for example, at least 60%, at least 65%, at least 70%, at least 75%, at least 80%, at least 85%, at least 90%, at least 95%, at least 96%, at least 97%, at least 98%, at least 99%) to SEQ ID NO: 713, wherein the CDRH2 comprises a polypeptide sequence at least 60% (for example, at least 60%, at least 65%, at least 70%, at least 75%, at least 80%, at least 85%, at least 90%, at least 95%, at least 96%, at least 97%, at least 98%, at least 99%) to SEQ ID NO: 749, and wherein the CDRH3 comprises a polypeptide sequence at least 60% (for example, at least 60%, at least 65%, at least 70%, at least 75%, at least 80%, at least 85%, at least 90%, at least 95%, at least 96%, at least 97%, at least 98%, at least 99%) to SEQ ID NO: 773. In some embodiments, the neutralizing antibody comprises a VL comprising a CDRL1, CDRL2, and CDRL3, wherein the CDRL1 comprises a polypeptide sequence at least 60% (for example, at least 60%, at least 65%, at least 70%, at least 75%, at least 80%, at least 85%, at least 90%, at least 95%, at least 96%, at least 97%, at least 98%, at least 99%) to SEQ ID NO: 851, wherein the CDRL2 comprises a polypeptide sequence at least 60% (for example, at least 60%, at least 65%, at least 70%, at least 75%, at least 80%, at least 85%, at least 90%, at least 95%, at least 96%, at least 97%, at least 98%, at least 99%) to SEQ ID NO: 879, and wherein the CDRL3 comprises a polypeptide sequence at least 60% (for example, at least 60%, at least 65%, at least 70%, at least 75%, at least 80%, at least 85%, at least 90%, at least 95%, at least 96%, at least 97%, at least 98%, at least 99%) to SEQ ID NO: 893.

[0205] In some aspect, disclosed herein is a method of treating HIV infection in a subject, comprising administering to the subject a therapeutically effective amount of the recombinant polypeptide and/or neutralizing antibody of any preceding aspect.

[0206] In some aspect, disclosed herein is a method of treating flu infection in a subject, comprising administering to the subject a therapeutically effective amount of the recombinant polypeptide and/or neutralizing antibody of any preceding aspect.

### EXAMPLES

[0207] The following examples are set forth below to illustrate the systems, methods, and results according to the disclosed subject matter. These examples are not intended to be inclusive of all aspects of the subject matter disclosed herein, but rather to illustrate representative methods and results. These examples are not intended to exclude equivalents and variations of the present invention which are apparent to one skilled in the art.

### Example 1. LIBRA-seq Method

[0208] LIBRA-seq transforms antibody-antigen interactions into sequencing-detectable events by conjugating DNA-barcoded oligos to each antigen in a screening library. All antigens are labeled with the same fluorophore, which enables sorting of antigen-positive B cells by fluorescence-activated cell sorting (FACS) before encapsulation of single B cells via droplet microfluidics. Antigen barcodes and BCR transcripts are tagged with a common cell barcode from bead-delivered oligos, enabling direct mapping of BCR sequence to antigen specificity (FIG. 1A).

[0209] To investigate the ability of LIBRA-seq to accurately unite BCR sequence and antigen specificity, a mapping experiment was devised using two Ramos B-cell lines with differing BCR sequences and antigen specificities (Weaver et al., 2016). These engineered B-cell lines do not display endogenous BCR and instead express specific, user-defined surface IgM BCR sequences (Weaver et al., 2016). To that end, two well-characterized BCRs were selected: VRC01, a CD4-binding site-directed HIV-1 bNAb (Wu et al., 2010), and Fe53, a bNAb recognizing the stem of group 1 influenza hemagglutinins (HA) (Lingwood et al., 2012). These two populations of B -cell lines were mixed at a 1:1 ratio and incubated with three unique DNA-barcoded antigens: two variants of the trimeric HIV-1 Env protein from strains BG505 and CZA97 (Georgiev et al., 2015; van Gils et al., 2013; Ringe et al., 2017), and trimeric hemagglutinin from strain H1 A/New Caledonia/20/1999 (Whittle et al., 2014) (FIG. 1B; FIGS. 5A-B and 6A).

[0210] 2321 cells with BCR sequence and antigen mapping information were recovered, highlighting the high throughput capacity of LIBRA-seq (FIG. 6B). For each cell, the LIBRA-seq scores for each antigen in the screening library were computed as a function of the number of unique molecular identifiers (UMIs) for the respective antigen barcode; therefore, scores serve as a proxy for the relative amount of bound antigen (Methods). The LIBRA-seq scores of each individual antigen reliably categorized Ramos B cells by their specificity (FIG. 1C). Overall, cells fell into two major populations based on their LIBRA-seq scores, and no cell was observed with cross-reactivity for influenza HA and HIV-1 Env (FIG. 1D). Further, VRC01 Ramos B cells bound both BG505 and CZA97 with a high correlation between the scores for these two antigens (Pearson's r=0.84), showing that LIBRA-seq readily identifies B cells that bind to multiple HIV-1 antigens (FIG. 1E).

### Example 2. Isolation of Antibodies from a Known HIV bNAb Lineage

[0211] LIBRA-seq was next used to analyze the antibody repertoire of donor NIAID 45, who had been living with HIV-1 without antiretroviral therapy for approximately 17 years at the time of sample collection. This sample was selected as an appropriate target for LIBRA-seq analysis because a large lineage of HIV-1 bNAbs had been identified previously from this donor (Bonsignori et al., 2018; Wu et al., 2010, 2015). This lineage consists of the prototypical bNAb VRC01, as well as multiple clades of clonally related bNAbs with diverse neutralization phenotypes (Wu et al., 2015). The same BG505, CZA97, and H1 A/New Caledonia/20/99 antigen screening library was used in the Ramos B-cell line experiments, recovering paired V_{H}:V_{L} antibody sequences with antigen mapping for 866 cells (FIG. 2A; FIGS. 6B and 7A). These B cells exhibited a variety of LIBRA-seq scores among the three antigens (FIG. 2B), as these were from a polyclonal sample possessing a wide variety of B cell specificities and antigen affinities. The cells displayed a few discrete patterns based on their LIBRA-seq scores; generally, cells were either (1) HA^{high}Env^{low} or (2) HA^{low}Env^{high} (FIG. 2B). Additionally, cells that were double positive for both HIV Env variants, BG505 and CZA97 were observed, indicating HIV-1 strain cross-reactivity of these B cells (FIG. 2B).

[0212] To further investigate LIBRA-seq in monoclonal antibody isolation, new members of the VRC01 antibody lineage were identified from the LIBRA-seq-identified antigen-specific B cells. 29 BCRs that were clonally related to previously-identified members of the VRC01 lineage (FIG. 2C) were observed. All newly identified BCRs had high levels of somatic hypermutation and utilized IGHV1-2*02 along with the characteristic five-residue CDRL3 paired with IGVK3-20 (FIG. 2D). These B cells came from multiple known clades of the VRC01 lineage, with sequences with high identity and phylogenetic relatedness to lineage members VRC01, VRC02, VRC03, VRC07, VRC08, NIH45-46, and others (FIG. 2C). Of these, 25 (87%) had a high LIBRA-seq score for at least 1 HIV-1 antigen, three (10%) had mid-range scores (between 0 and 1) for at least 1 HIV-1 antigen, and only one of the VRC01 lineage B cells had negative scores for both HIV-1 antigens (FIG. 2C, FIG. 7B). Three of the newly identified lineage members, named 2723-3055, 2723-4186 and 2723-3131, were recombinantly expressed to confirm the ability of these antibodies to bind the screening probes. 2723-3131 bound to CZA97 and had somewhat lower binding to BG505 by enzyme linked immunosorbent assay (ELISA) (FIG. 2D). 2723-3131 did not neutralize any viruses on the global panel (deCamp et al., 2014) but did neutralize two Tier one viruses (FIG. 2E). Both 2723-3055 and 2723-4186 bound to BG505 and CZA97, and potently neutralized 11/12 and 12/12 viruses on a global panel, respectively (FIG. 2D-2E). Together, the results from the donor 45 analysis show that the LIBRA-seq platform can be successfully used to down-select cross-reactive bNAbs in prospective antibody discovery efforts.

### Example 3. Identification of Additional Broadly-Reactive Anti-HIV and Anti-Influenza Antibodies

[0213] To further assess the ability of LIBRA-seq to accurately identify antigen-specific B cells, a number of putative HIV-specific and influenza-specific monoclonal antibodies were produced from donor 45 that did not belong to the VRC01 lineage. In particular, seven additional anti-HIV antibodies were recombinantly produced, three of which were clonally related (2723-2121, 2723-422, and 2723-2304) (FIG. 2F). These seven antibodies were selected because all had high LIBRA-seq scores for at least one HIV-1 antigen. All seven antibodies bound the antigens by ELISA based on the respective LIBRA-seq scores, with high similarity between the patterns of LIBRA-seq scores and ELISA area under the curve (AUC) values (FIG. 2F, FIG. 7C, Methods). One of these antibodies, 2723-2121, were characterized, determining that it bound to a stabilized BG505 trimer (Do Kwon et al., 2015) by surface plasmon resonance (SPR) (FIG. 8A), was indicated to have a CD4 binding site epitope specificity (FIG. 8B), neutralized three Tier 1 pseudoviruses and 2/11 Tier 2 pseudoviruses from the global panel (FIG. 8C), and mediated trogocytosis and antibody-dependent cellular phagocytosis (FIG. 8D). In addition to the HIV-specific antibodies, assessment was performed to characterize two antibodies predicted of having influenza specificity based on their LIBRA-seq scores for H1 A/New Caledonia/20/99 (FIG. 2F). In agreement with the LIBRA-seq scores, antibodies 2723-2859 and 2723-3415 bound H1 A/New Caledonia/20/99 but not BG505 or CZA97 by ELISA, confirming the ability of LIBRA-seq to simultaneously isolate antibodies to multiple diverse antigens (FIG. 2F, FIG. 7C).

### Example 4. Discovery of an HIV bNAb using a Nine-Antigen Screening Library

[0214] Having validated LIBRA-seq with three antigens on both Ramos B cell lines and primary B cells from a patient sample, experiment was performed to increase the number of antigens in the screening library. To that end, the B cell repertoire of NIAID donor N90 was screened against nine antigens (FIG. 3A). This sample was selected because a single broadly neutralizing antibody lineage (VRC38) targeting the V1/V2 epitope was isolated previously from this donor; however, the neutralization breadth of the VRC38 lineage could not account for the full serum neutralization breadth (Cale et al., 2017; Wu et al., 2012). This suggests that there could be additional bNAb lineages present in the B cell repertoire of N90 and that utilizing multiple SOSIP probes could help accelerate identification of such antibodies. Thus, whether LIBRA-seq can accomplish two goals was determined: (1) to recover antigen-specific B cells from the VRC38 lineage, and (2) to identify new bNAbs that can neutralize viruses that are resistant to the VRC38 lineage but sensitive to the serum.

[0215] To increase the number of antigens in the screening library, a panel consisted of five HIV-1 Env trimers from a variety of clades, BG505 (clade A), B41 (clade B), ZM106.9 (clade C), ZM197 (clade C) and KNH1144 (clade A) was utilized (van Gils et al., 2013; Harris et al., 2011; Joyce et al., 2017; Julien et al., 2015; Pugach et al., 2015; Ringe et al., 2017), along with four diverse hemagglutinin trimers (H1 A/New Caledonia/20/99, H1 A/Michigan/45/2015, H5 A/Indonesia/5/2005, and H7 A/Anhui/1/2013) (FIG. 3A, FIG. 5A). After applying LIBRA-seq to donor N90 PBMCs, paired V_{H}:V_{L} antibody sequences with antigen mapping for 1465 cells (FIG. 6B, 9A) were recovered. Within this set of cells, eighteen B cells were identified as members of the VRC38 lineage (FIG. 3B). Of these, seventeen had high LIBRA-seq scores for at least one HIV antigen, and one had no high LIBRA-seq scores but had a mid-range score for two SOSIPs (FIG. 3B), indicating that LIBRA-seq can successfully identify HIV-1 reactivity for virtually all B cells from the VRC38 lineage.

[0216] The B cells with the highest LIBRA-seq scores in the N90 sample were analyzed, especially those cells that had LIBRA-seq scores for any antigen above one (901 cells) (FIG. 10). 32 cells were observed with high LIBRA-seq scores for three of the four influenza antigens (FIG. 3F); one of these, 3602-1707, was recombinantly produced and confirmed with broad influenza recognition, with high correlation between LIBRA-seq scores and ELISA AUC (Spearman correlation 0.77, p=0.015) (FIG. 3C, FIG. 9B).

[0217] Cells that had high LIBRA-seq scores for each of multiple HIV-1 antigens were also observed, including 124 cells that had high scores for four or more SOSIPs (FIG. 3F). SOSIP-high B cells were then down selected based on two requirements: (1) high LIBRA-seq scores to at least 3 SOSIP variants, and (2) one of these SOSIP variants must be ZM106.9, since the serum of N90 neutralized ZM106.9 but the VRC38 lineage did not (Cale et al., 2017). In particular, two members from the same antibody lineage were identified with high LIBRA-seq scores for BG505, KNH1144, ZM106.9 and ZM197. This lineage utilized the germline genes IGHV1-46 and IGK3-20, was highly mutated in both the heavy- and light-chain V genes, and had a 19 amino acid CDRH3 and nine amino acid CDRL3. One of the lineage members, 3602-870, that was 28.5% mutated in its heavy chain V gene and 17.0% mutated in its light chain V gene (FIG. 3C) was recombinantly expressed. 3602-870 bound all SOSIP probes by ELISA (Spearman correlation of 0.97, p<0.001 between LIBRA-seq scores and ELISA AUC) and neutralized 79% of tested Tier 2 viruses (11/14), including four viruses that were not neutralized by VRC38.01 (TRO.11, CH119.10, 25710.2.43, and CE1176.A3) (Cale et al., 2017) (FIG. 3D, FIG. 9B). Of note, 3602-870 neutralized BG505 and ZM197, both of which were used as probes in the antigen screening library (FIG. 3D). 3602-870 bound BG505 DS-SOSIP by SPR and competed for BG505 DS-SOSIP binding to the greatest extent with VRC01 Fab (FIG. 3E). In summary, LIBRA-seq enabled the high-throughput, highly multiplexed screening of single B cells against many HIV antigen variants. This resulted in the identification of hundreds of antigen-specific monoclonal antibody leads from donor N90, with high-resolution antigen specificity mapping helping to facilitate rapid lead prioritization to identify a novel bNAb lineage.

### Example 5. Discussion

[0218] Disclosed herein is a method to interrogate antibody-antigen interactions via a sequencing-based readout were disclosed. New members of two known HIV-specific bNAb lineages were identified from previously characterized human infection samples and a novel bNAb lineage. Additionally, many other broadly-reactive HIV-specific antibodies were identified and investigated regarding their specificity for a subset of them. Within both HIV-1 infection samples, influenza-specific antibodies were also isolated using hemagglutinin screening probes, highlighting LIBRA-seq for use in methods of simultaneously screening B cell repertoires against multiple, diverse antigen targets. The NGS-based coupling of antibody sequence and specificity enables screening of potentially millions of single B cells for reactivity to a larger repertoire of epitopes than purely fluorescence-based methods, since sequence space is not hindered by spectral overlap. Using LIBRA-seq therefore helps to maximize lead discovery per experiment, an important consideration when preserving limited sample.

[0219] Beyond LIBRA-seq's importance in antibody discovery, the high-throughput coupling of antibody sequence and specificity can enable high-resolution immune profiling. For example, in donor N90, the use of specific germline genes (e.g., IGHV1-69, IGHV4-39, and IGHV1-18) was enriched in B cells that exhibited broad, as opposed to strain-specific, HIV-1 antigen reactivity (FIG. 4A-4B). In addition, an increase in somatic hypermutation levels was observed between B cells that bind a single SOSIP probe versus those that bind multiple probes (FIG. 4C). The elucidation of such relationships, enabled by the LIBRA-seq technology, can allow germline-targeting vaccine design efforts (Dosenovic et al., 2019; Jardine et al., 2013, 2016; Stamatatos et al., 2017) and can also allow the determination of the requirements for the acquisition of HIV-1 antigen cross-reactivity.

### Example 6. Methods and Materials

[0220] Antigen expression and purification. For the different LIBRA-seq experiments, a total of six HIV-1 gp140 SOSIP variants from strains BG505 (clade A), CZA97 (clade C), B41 (clade B), ZM197 (clade C), ZM106.9 (clade C), KNH1144 (clade A) and four influenza hemagglutinin variants from strains A/New Caledonia/20/99 (H1N1) (GenBank ACF41878), A/Michigan/45/2015 (H1N1) (GenBank AMA11475), A/Indonesia/5/2005 (H5N1) (GenBank ABP51969), and A/Anhui/1/2013 (H7N9) (GISAID EPI439507) were expressed as recombinant soluble antigens.

[0221] The single-chain variants (Georgiev et al., 2015) of BG505, CZA97, B41, ZM197, ZM106.9, and KNH1144 each containing an Avi tag, were expressed in 293F mammalian cells using polyethylenimine (PEI) transfection reagent and cultured for 5-7 days. Next, cultures were centrifuged at 6000 rpm for 20 minutes. Supernatant was 0.45 μm filtered with Nalgene Rapid Flow Disposable Filter Units with PES membrane, and then run slowly over an affinity column of agarose bound Galanthus nivalis lectin (Vector Laboratories cat no. AL-1243-5) at 4° C. The column was washed with PBS, and proteins were eluted with 30 mL of 1 M methyl-α-D-mannopyranoside. The protein elution was buffer exchanged 3× into PBS and concentrated using 30 kDa Amicon Ultra centrifugal filter units. Concentrated protein was run on a Superdex 200 Increase 10/300 GL sizing column on the AKTA FPLC system, and fractions were collected on an F9-R fraction collector. Fractions corresponding to correctly folded antigen were analyzed by SDS-PAGE, and antigenicity by ELISA was characterized with known monoclonal antibodies specific for that antigen.

[0222] Recombinant HA proteins all contained the HA ectodomain with a point mutation at the sialic acid-binding site (Y98F), T4 fibritin foldon trimerization domain, Avi tag, and hexahistidine tag, and were expressed in Expi 293F mammalian cells using Expifectamine 293 transfection reagent (Thermo Fisher Scientific) cultured for 4-5 days. Culture supernatant was harvested and cleared as above, and then adjusted pH and NaCl concentration by adding 1M Tris-HCl (pH 7.5) and 5M NaCl to 50 mM and 500 mM, respectively. Ni Sepharose excel resin (GE Healthcare) was added to the supernatant to capture hexahistidine tag. Resin was separated on a column by gravity and captured HA protein was eluted by a Tris-NaCl (pH 7.5) buffer containing 300 mM imidazole. The eluate was further purified by a size exclusion chromatography with a HiLoad 16/60 Superdex 200 column (GE Healthcare). Fractions containing HA were concentrated, analyzed by SDS-PAGE and tested for antigenicity by ELISA with known antibodies. Proteins were frozen in LN2 and stored at −80C° until use.

[0223] All antigens included an AviTag modification at the C-terminus of their sequence, and after purification, each AviTag labeled antigen was biotinylated using the BirA-500: BirA biotin-protein ligase standard reaction kit (Avidity LLC, cat no. BirA500).

[0224] Oligonucleotide barcode design. Oligo used herein possess a 13-15 bp antigen barcode, a sequence capable of annealing to the template switch oligo that is part of the 10× bead-delivered oligos, and contain truncated TruSeq small RNA read 1 sequences in the following structure: 5′-CCTTGGCACCCGAGAATTCCANNNNNNNNNNNNNCCCATATAAGA*A*A-3′ (SEQ ID NO: 949), where Ns represent the antigen barcode. For the cell line and NIAID45 experiments, we used the following antigen barcodes: CATGATTGGCTCA (SEQ ID NO: 950) (BG505), TGTCCGGCAATAA (SEQ ID NO: 951) (CZA97), GATCGTAATACCA (SEQ ID NO: 952) (H1 A/New Caledonia/20/99). For the N90 experiment, we used longer antigen barcodes (15 bp), as follows: TCCTTTCCTGATAGG (SEQ ID NO: 953) (ZM106.9), TAACTCAGGGCCTAT (SEQ ID NO: 954) (KNH1144), GCTCCTTTACACGTA (SEQ ID NO: 955) (ZM197), GCAGCGTATAAGTCA (SEQ ID NO: 956) (B41), ATCGTCGAGAGCTAG (SEQ ID NO: 957) (BG505), CAGGTCCCTTATTTC (SEQ ID NO: 958) (A/Indonesia/5/2005), ACAATTTGTCTGCGA (SEQ ID NO: 959) (A/Anhui/1/2013), TGACCTTCCTCTCCT (SEQ ID NO: 960) (A/Michigan/45/2015), AATCACGGTCCTTGT (SEQ ID NO: 961) (A/New Caledonia/20/99). Oligos were ordered from Sigma-Aldrich and IDT with a 5′ amino modification and HPLC purified.

[0225] Conjugation of oligonucleotide barcodes to antigens. For each antigen, a unique DNA “barcode” was directly conjugated to the antigen itself. In particular, 5′ amino-oligonucleotides were conjugated directly to each antigen using the Solulink Protein-Oligonucleotide Conjugation Kit (TriLink cat no. S-9011) according to manufacturer's instructions. Briefly, the oligo and protein were desalted, and then the amino-oligo was modified with the 4FB crosslinker, and the biotinylated antigen protein was modified with S-HyNic. Then, the 4FB-oligo and the HyNic-antigen were mixed together. This causes a stable bond to form between the protein and the oligonucleotide. The concentration of the antigen-oligo conjugates was determined by a BCA assay, and the HyNic molar substitution ratio of the antigen-oligo conjugates was analyzed using the NanoDrop according to the Solulink protocol guidelines. AKTA FPLC was used to remove excess oligonucleotide from the protein-oligo conjugates. Additionally, the antigen-oligo conjugates were analyzed via SDS-PAGE with a silver stain.

[0226] Fluorescent labeling of antigens. After attaching DNA barcodes directly to a biotinylated antigen, the barcoded antigens were mixed with streptavidin labeled with fluorophore phycoerythrin (PE). The streptavidin-PE was mixed with biotinylated antigen at a 5× molar excess of antigen to streptavidin. 1/5 of the streptavidin-oligo conjugate was added to the antigen every 20 minutes with constant rotation at 4° C.

[0227] B cell lines production and identification by sequencing. B cell lines were engineered from a clone of Ramos Burkitt's lymphoma that do not display endogenous antibody, and they ectopically express specific surface IgM B cell receptor sequences. The B cell lines used expressed B cell receptor sequences for HIV-1 specific antibody VRC01 and influenza specific antibody Fe53. The cells are cultured at 37° C. with 5% CO2 saturation in complete RPMI, made up of RPMI supplemented with 15% fetal bovine serum, 1% L-Glutamine, and 1% Penicillin/Streptomycin. Although endogenous heavy chains are scrambled, endogenous light chain transcripts remain and are detectable by sequencing. We thus identified and classified single Ramos Burkitt's B cells as either VRC01 or FE53 based on their heavy chain sequences. These Ramos B cell lines were validated for binding to our antigen probes by FACS.

[0228] Donor PBMCs. Donor NIAID45 Peripheral blood mononuclear cells were collected from donor NIAID45 on July 12, 2007. Donor NIAID45, from whom antibodies VRC01, VRC02, VRC03, VRC06, VRC07, VRC08, NIH45-46, and others from the VRC01 bNAb lineage had been previously isolated, was enrolled in investigational review board approved clinical protocols at the National Institute of Allergy and Infectious Diseases and had been living with HIV without antiretroviral treatment for approximately 17 years at the time of sample collection. Donor N90 Peripheral blood mononuclear cells were collected from donor N90 on May 29, 2008. Donor N90, from whom antibody lineage VRC38 had been previously isolated, was enrolled in investigational review board approved clinical protocols at the National Institute of Allergy and Infectious Diseases and had been living with HIV without antiretroviral treatment through the timepoint of sample collection since diagnosis in 1985 (Wu et al., 2012).

[0229] Enrichment of antigen-specific IgG+B cells. For the given sample, cells were stained and mixed with fluorescently labeled DNA-barcoded antigens and other antibodies, and then sorted using fluorescence activated cell sorting (FACS). First, cells were counted and viability was assessed using Trypan Blue. Then, cells were washed with DPBS supplemented with 1% Bovine serum albumin (BSA) through centrifugation at 300 g for 7 minutes. Cells were resuspended in PBS-BSA and stained with a variety of cell markers. For donor NIAID 45 PBMCs, these markers included CD3-APCCy7, IgG-FITC, CD19-BV711, CD14-V500, and LiveDead-V500. Additionally, fluorescently labeled antigen-oligo conjugates (described above) were added to the stain, so antigen-specific sorting could occur. For donor N90 PBMCs, these markers included LiveDead-APCCy7, CD14-APCCy7, CD3-FITC, CD19-BV711, and IgG-PECy5. Additionally, fluorescently labeled antigen-oligo conjugates were added to the stain, so antigen-specific sorting could occur. After staining in the dark for 30 minutes at room temperature, cells were washed 3 times with PBS-BSA at 300 g for 7 minutes. Then, cells were resuspended in PBS-BSA and sorted on the cell sorter. Antigen positive cells were bulk sorted and then they were delivered to the Vanderbilt VANTAGE sequencing core at an appropriate target concentration for 10× Genomics library preparation and NGS analysis. FACS data were analyzed using Cytobank (Kotecha et al., 2010).

[0230] 10× single cell processing and next generation sequencing. Single-cell suspensions were loaded onto the Chromium microfluidics device (10× Genomics) and processed using the B-cell VDJ solution according to manufacturer's suggestions for a target capture of 10,000 B cells per 1/8 10× cassette for B cell lines, 9,000 cells for B cells from donor NIAID45, and 4,000 for donor N90, with minor modifications in order to intercept, amplify and purify the antigen barcode libraries. The library preparation follows the CITE-seq protocol (available at cite-seq.com), with the exception of an increase in the number of PCR cycles of the antigen barcodes. Briefly, following cDNA amplification using an additive primer (5′ -CCTTGGCACCCGAGAATT*C*C-3′) (SEQ ID NO: 962) to increase the yield of antigen barcode libraries (Stoeckius et al., 2017), SPRI separation was used to size separate antigen barcode libraries from cellular mRNA libraries, PCR amplified for 10-12 cycles, and purified using 1.6× purification. Sample preparation for the cellular mRNA library continued according to 10× Genomics-suggested protocols, resulting in Illumina-ready libraries. Following library construction, we sequenced both BCR and antigen barcode libraries on a NovaSeq 6000 at the VANTAGE sequencing core, dedicating ˜2.5% of a flow cell to each experiment, with a target 10% of this fraction dedicated to antigen barcode libraries. This resulted in ˜334 5 million reads for the cell line V(D)J libraries (˜96,500 reads/cell), ˜376.3 million reads for donor NIAID45 V(D)J libraries (˜79,300 reads/cell), and ˜272 4 million reads for the N90 V(D)J libraries (˜151,400 reads/cell). Additionally, this sequencing depth resulted in ˜46.7 million total reads for antigen barcode library of the cell lines, ˜39 6 million reads for the antigen barcode library of donor NIAID45, and ˜82 9 million reads for the antigen barcode library for N90.

[0231] Processing of antigen barcode reads and BCR sequence contigs. A pipeline shown herein takes paired-end fastq files of oligo libraries as input, processes and annotates reads for cell barcode, UMI, and antigen barcode, and generates a cell barcode—antigen barcode UMI count matrix. BCR contigs are processed using cellranger (10× Genomics) using GRCh38 as reference. For the antigen barcode libraries, initial quality and length filtering is carried out by fastp (Chen et al., 2018) using default parameters for filtering. This results in only high-quality reads being retained in the antigen barcode library (FIG. 11). In a histogram of insert lengths, this results in a sharp peak of the expected insert size of 52-54 (FIG. 9B-9C). Fastx_collapser is then used to group identical sequences and convert the output to deduplicated fasta files. Then, having removed low-quality reads, just the R2 sequences were processed, as the entire insert is present in both R1 and R2. Each unique R2 sequence (or R1, or the consensus of R1 and R2) was processed one by one using the following steps: (1) The reverse complement of the R2 sequence was determined (Skip step 1 if using R1). (2) The sequence was screened for possessing an exact match to any of the valid 10× cell barcodes present in the filtered_contig.fasta file output by cell ranger during processing of BCR V(D)J fastq files. Sequences without a BCR-associated cell barcode were discarded. (3) The 10 bases immediate 3′ to the cell barcode were annotated as the read's UMI. (4) The remainder of the sequence 3′ to the UMI is screened for a 13 or 15 bp sequence with a hamming distance of 0, 1, or 2 to any of the antigen barcodes used in the screening library. Following this processing, only sequences with lengths of 51 to 58 were retained, thus allowing for a deletion, an insertion outside the cell barcode, or bases flanking the cell barcode. This general process requires that sequences possess all elements needed for analysis (cell barcode, UMI, and antigen barcode), but is permissive to insertions or deletions in the TSO region between the UMI and antigen barcode. After processing each sequence one-by-one, we screened for cell barcode—UMI—antigen barcode collisions. Any cell barcode—UMI combination (indicative of a unique oligo molecule) that had multiple antigen barcodes associated with it was removed. A cell barcode—antigen barcode UMI count matrix was then constructed, which served as the basis of subsequent analysis. Additionally, the BCR contigs were aligned (filtered_contigs.fasta file output by Cellranger, 10× Genomics) to IMGT reference genes using HighV-Quest (Alamyar et al., 2012). The output of HighV-Quest is parsed using ChangeO (Gupta et al., 2015), and merged with the UMI count matrix.

[0232] Determination of LIBRA-seq Score. Starting with the UMI count matrix, all counts of 1, 2, or 3 UMIs were set to 0, with the idea that these low counts can be attributed to noise. After this, the UMI count matrix was subset to contain only cells with a count of at least 4 UMIs for at least 1 antigen. The centered-log ratios (CLR) of each antigen UMI count for each cell were then calculated (Mimitou et al., 2019; Stoeckius et al., 2017, 2018). Because UMI counts were on different scales for each antigen, due to differential oligo loading during oligo-antigen conjugation, the CLRs UMI counts were rescaled using the StandardScaler method in scikit learn (Pedregosa and Varoquaux, 2011). Lastly, A correction procedure was performed to the z-score-normalized CLRs from UMI counts of 0, setting them to the minimum for each antigen for donor NIAID 45 and N90 experiments, and to −1 for the Ramos B cell line experiment. These CLR-transformed, Z-score-normalized, corrected values served as the final LIBRA-seq scores. LIBRA-seq scores were visualized using Cytobank (Kotecha et al., 2010).

[0233] Phylogenetic trees. Phylogenetic trees of antibody heavy chain sequences were constructed in order to assess the relative relatedness of antibodies within a given lineage. For the VRC01 lineage, the 29 sequences identified by LIBRA-seq and 52 sequences identified from the literature were aligned using clustal within Geneious. We then used the PhyML maximum likelihood (Guindon et al., 2009) plugin in Geneious (available at www.geneious.com/plugins/phyml-plugin/) to infer a phylogenetic tree. The resulting tree was then rooted to the inferred unmutated common ancestor (Bonsignori et al., 2018) (accession MK032222). A similar process was used to build a phylogenetic tree for lineage 2121, with one exception. Rather than using an inferred germline precursor, the IGHV and IGHJ genes were germline-reverted and the CDRH3 nucleotide sequence of the lineage member was used with the least IGHV somatic mutation. Trees were annotated and visualized in iTol (Letunic and Bork, 2019).

[0234] Antibody expression and purification. For each antibody, variable genes were inserted into plasmids encoding the constant region for the heavy chain (pFUSE-CHIg, Invivogen) and light chain (pFUSE2-CLIg, Invivogen) and synthesized from GenScript. In cases where the IgBLAST-aligned sequence was missing any residues at the beginning of framework 1 or end of framework 4, sequences were completed with germline residues. mAbs were expressed in Expi 293F mammalian cells by co-transfecting heavy chain and light chain expressing plasmids using polyethylenimine (PEI) transfection reagent and cultured for 5-7 days. Next, cultures were centrifuged at 6000 rpm for 20 minutes. Supernatant was 0.45 μm filtered with Nalgene Rapid Flow Disposable Filter Units with PES membrane. Filtered supernatant was run over a column containing Protein A agarose resin that had been equilibrated with PBS. The column was washed with PBS, and then antibodies were eluted with 100 mM Glycine HCl at pH 2.7 directly into a 1:10 volume of 1 M Tris-HCL pH 8. Eluted antibodies were buffer exchanged into PBS 3 times using 10 kDa Amicon Ultra centrifugal filter units.

[0235] Enzyme linked immunosorbent assay (ELISA). For ELISAs, soluble hemagglutinin protein was plated at 2 μg/ml overnight at 4° C. The next day, plates were washed three times with PBS supplemented with 0.05% Tween20 (PBS-T) and coated with 5% milk powder in PBS-T. Plates were incubated for one hour at room temperature and then washed three times with PBS-T. Primary antibodies were diluted in 1% milk in PBS-T, starting at 10 μg/ml with a serial 1:5 dilution and then added to the plate. The plates were incubated at room temperature for one hour and then washed three times in PBS-T. The secondary antibody, goat anti-human IgG conjugated to peroxidase, was added at 1:20,000 dilution in 1% milk in PBS-T to the plates, which were incubated for one hour at room temperature. Plates were washed three times with PBS-T and then developed by adding TMB substrate to each well. The plates were incubated at room temperature for ten minutes, and then 1 N sulfuric acid was added to stop the reaction. Plates were read at 450 nm.

[0236] For recombinant trimer capture for single-chain SOSIPs, 2 μg/ml of a mouse anti-AviTag antibody (GenScript) was coated overnight at 4 C in phosphate-buffered saline (PBS) (pH 7.5). The next day plates were washed three times with PBS-T, and blocked with 5% milk in PBS-T. After an hour incubation at room temperature and three washes with PBS-T, 2 μg/ml of recombinant trimer proteins diluted in 1% milk PBS-T were added to the plate and incubated for one hour at room temperature. Primary and secondary antibodies, along with substrate and sulfuric acid, were added as described above. ELISAs were performed in at least two experimental replicates and data were graphed using GraphPad Prism 8.0.0. Data shown is representative of one replicate, with error bars representing standard error of the mean for technical duplicates within that experiment. The area under the curve (AUC) was calculated using GraphPad Prism 8.0.0.

[0237] TZM-bl Neutralization Assays. Antibody neutralization was assessed using the TZM-bl assay as described (Sarzotti-Kelsoe et al., 2014). This standardized assay measures antibody-mediated inhibition of infection of JC53BL-13 cells (also known as TZM-bl cells) by molecularly cloned Env-pseudoviruses. Viruses that are highly sensitive to neutralization (Tier 1) and those representing circulating strains that are moderately sensitive (Tier 2) were included. Antibodies were tested against a variety of Tier 1 viruses and the Tier 2 Global panel plus additional viruses, including a subset of the antigens used for LIBRA-seq. Murine leukemia virus (MLV) was included as an HIV-specificity control and VRC01 was used as a positive control. Results are presented as the concentration of monoclonal antibody (in μg/ml) required to inhibit 50% of virus infection (IC₅₀).

[0238] Surface Plasmon Resonance and Fab competition. The binding of antibody 2723-2121 to BG505 DS-SOSIP (Do Kwon et al., 2015) was assessed by surface plasmon resonance on Biacore T-200 (GE-Healthcare) at 25° C. with HBS-EP+ (10 mM HEPES, pH 7.4, 150 mM NaCl, 3 mM EDTA, and 0.05% surfactant P-20) as the running buffer. Antibodies VRC01 and PGT145 were tested as positive control, and antibody 17b was tested as negative control to confirm that the trimer was in the closed conformation. Antibody 2723-2121 was captured on a flow cell of CM5 chip immobilized with ˜7500 RU of anti-human Fc antibody, and binding was measured by flowing over a 200 nM solution BG505-DS SOSIP in running buffer. Similar runs were performed with VRC01, PGT145 and 17b IgGs. To determine the epitope of antibody 2723-2121, we captured 2723-2121 IgG on a single flow cell of CM5 chip immobilized with ˜7500 RU of anti-human Fc antibody. Next 200 nM BG505 DS-SOSIP, either alone or with different concentrations of antigen binding fragments (Fab) of VRC01 or PGT145 or VRC34 was flowed over the captured 2723-2121 flow cell for 60 s at a rate of 10 μl/min. The surface was regenerated between injections by flowing over 3M MgCl₂ solution for 10 s with flow rate of 100 μl/min. Blank sensorgrams were obtained by injection of same volume of HBS-EP+ buffer in place of trimer with Fabs solutions. Sensorgrams of the concentration series were corrected with corresponding blank curves. The binding of antibody 3602-870 to BG505 DS-SOSIP was assessed by surface plasmon resonance in the same way as described for 2723-2121. For 3602-870, competition experiments were performed with PGT145 Fab, PGT122 Fab, and VRC01 Fab.

[0239] ADCP, ADCD, Trogocytosis, ADCC Assays. Antibody-dependent cellular phagocytosis (ADCP) was performed using gp120 ConC coated neutravidin beads as previously described (Ackerman et at, 2011). Phagocytosis score was determined as the percentage of cells that took up beads multiplied by the fluorescent intensity of the beads. Antibody-dependent complement deposition (ADCD) was performed as in (Richardson et al., 2018a) where CEM.NKR.CCRS gp120 ConC coated target cells were opsonized with mAb and incubated with complement from a healthy donor. C3b deposition was then determined by flow cytometry with complement deposition score determined as the percentage of C3b positive cells multiplied by the fluorescence intensity. Antibody dependent cellular trogocytosis (ADCT) was measured as the percentage transfer of PKH26 dye of the surface of CEM.NKR.CCRS target cells to CSFE stained monocytic cell line THP-1 cells in the presence of HIV specific mAbs as described elsewhere (Richardson et al., 2018b). Antibody-dependent cellular cytotoxicity (ADCC) was done using a GranToxiLux based assay (Pollara et al., 2011) with gp120 ConC coated CEM.NKR.CCRS target cells and PBMCs from a healthy donor. The percentage of granzyme B present in target cells was measured by flow cytometry.

[0240] Statistics. ELISA error bars (standard error) were calculated using GraphPad Prism version 8.0.0. The Pearson's r value comparing BG505 and CZA97 LIBRA-seq scores for Ramos B-cell lines was calculated using Cytobank. Spearman correlations and associated p values were calculated using SciPy in Python.

TABLE 1
Nucleic acid sequences encoding heavy and light chains of antibodies and the cell barcodes thereof.

| | | | SEQ ID NO for | SEQ ID NO for | |
|---|---|---|---|---|---|
| | | SEQ ID NO for | Heavy Chain | Light Chain | |
| Donor | Index | Cell Barcode | Contig | Contig | Selection logic |
| N90 | 585 | 1 | 223 | 445 | Cross-reactive HIV |
| N90 | 1758 | 2 | 224 | 446 | Cross-reactive HIV |
| N90 | 3086 | 3 | 225 | 447 | Cross-reactive HIV |
| N90 | 2163 | 4 | 226 | 448 | Cross-reactive HIV |
| N90 | 627 | 5 | 227 | 449 | Cross-reactive HIV |
| N90 | 3218 | 6 | 228 | 450 | Cross-reactive HIV |
| N90 | 490 | 7 | 229 | 451 | Cross-reactive HIV |
| N90 | 84 | 8 | 230 | 452 | Cross-reactive HIV |
| N90 | 3023 | 9 | 231 | 453 | Cross-reactive HIV |
| N90 | 370 | 10 | 232 | 454 | Cross-reactive HIV |
| N90 | 2064 | 11 | 233 | 455 | Cross-reactive HIV |
| N90 | 2673 | 12 | 234 | 456 | Cross-reactive HIV |
| N90 | 3279 | 13 | 235 | 457 | Cross-reactive HIV |
| N90 | 2394 | 14 | 236 | 458 | Cross-reactive HIV |
| N90 | 2429 | 15 | 237 | 459 | Cross-reactive HIV |
| N90 | 1582 | 16 | 238 | 460 | Cross-reactive HIV |
| N90 | 2808 | 17 | 239 | 461 | Cross-reactive HIV |
| N90 | 2320 | 18 | 240 | 462 | Cross-reactive HIV |
| N90 | 2052 | 19 | 241 | 463 | Cross-reactive HIV |
| N90 | 1057 | 20 | 242 | 464 | Cross-reactive HIV |
| N90 | 1140 | 21 | 243 | 465 | Cross-reactive HIV |
| N90 | 2538 | 22 | 244 | 466 | Cross-reactive HIV |
| N90 | 2212 | 23 | 245 | 467 | Cross-reactive HIV |
| N90 | 1925 | 24 | 246 | 468 | Cross-reactive HIV |
| N90 | 528 | 25 | 247 | 469 | Cross-reactive HIV |
| N90 | 3353 | 26 | 248 | 470 | Cross-reactive HIV |
| N90 | 2302 | 27 | 249 | 471 | Cross-reactive HIV |
| N90 | 318 | 28 | 250 | 472 | Cross-reactive HIV |
| N90 | 3258 | 29 | 251 | 473 | Cross-reactive HIV |
| N90 | 2664 | 30 | 252 | 474 | Cross-reactive HIV |
| N90 | 2548 | 31 | 253 | 475 | Cross-reactive HIV |
| N90 | 1762 | 32 | 254 | 476 | Cross-reactive HIV |
| N90 | 1062 | 33 | 255 | 477 | Cross-reactive HIV |
| N90 | 1284 | 34 | 256 | 478 | Cross-reactive HIV |
| N90 | 592 | 35 | 257 | 479 | Cross-reactive HIV |
| N90 | 2876 | 36 | 258 | 480 | Cross-reactive HIV |
| N90 | 1887 | 37 | 259 | 481 | Cross-reactive HIV |
| N90 | 1178 | 38 | 260 | 482 | Cross-reactive HIV |
| N90 | 2507 | 39 | 261 | 483 | Cross-reactive HIV |
| N90 | 957 | 40 | 262 | 484 | Cross-reactive HIV |
| N90 | 3359 | 41 | 263 | 485 | Cross-reactive HIV |
| N90 | 1904 | 42 | 264 | 486 | Cross-reactive HIV |
| N90 | 1692 | 43 | 265 | 487 | Cross-reactive HIV |
| N90 | 1661 | 44 | 266 | 488 | Cross-reactive HIV |
| N90 | 1407 | 45 | 267 | 489 | Cross-reactive HIV |
| N90 | 1042 | 46 | 268 | 490 | Cross-reactive HIV |
| N90 | 1954 | 47 | 269 | 491 | Cross-reactive HIV |
| N90 | 1442 | 48 | 270 | 492 | Cross-reactive HIV |
| N90 | 2211 | 49 | 271 | 493 | Cross-reactive HIV |
| N90 | 451 | 50 | 272 | 494 | Cross-reactive HIV |
| N90 | 3544 | 51 | 273 | 495 | Cross-reactive HIV |
| N90 | 3232 | 52 | 274 | 496 | Cross-reactive HIV |
| N90 | 3226 | 53 | 275 | 497 | Cross-reactive HIV |
| N90 | 2985 | 54 | 276 | 498 | Cross-reactive HIV |
| N90 | 180 | 55 | 277 | 499 | Cross-reactive HIV |
| N90 | 2427 | 56 | 278 | 500 | Cross-reactive HIV |
| N90 | 1433 | 57 | 279 | 501 | Cross-reactive HIV |
| N90 | 979 | 58 | 280 | 502 | Cross-reactive HIV |
| N90 | 889 | 59 | 281 | 503 | Cross-reactive HIV |
| N90 | 442 | 60 | 282 | 504 | Cross-reactive HIV |
| N90 | 389 | 61 | 283 | 505 | Cross-reactive HIV |
| N90 | 3494 | 62 | 284 | 506 | Cross-reactive HIV |
| N90 | 3093 | 63 | 285 | 507 | Cross-reactive HIV |
| N90 | 2420 | 64 | 286 | 508 | Cross-reactive HIV |
| N90 | 2232 | 65 | 287 | 509 | Cross-reactive HIV |
| N90 | 1884 | 66 | 288 | 510 | Cross-reactive HIV |
| N90 | 463 | 67 | 289 | 511 | Cross-reactive HIV |
| N90 | 334 | 68 | 290 | 512 | Cross-reactive HIV |
| N90 | 223 | 69 | 291 | 513 | Cross-reactive HIV |
| N90 | 3415 | 70 | 292 | 514 | Cross-reactive HIV |
| N90 | 1992 | 71 | 293 | 515 | Cross-reactive HIV |
| N90 | 1987 | 72 | 294 | 516 | Cross-reactive HIV |
| N90 | 1977 | 73 | 295 | 517 | Cross-reactive HIV |
| N90 | 1848 | 74 | 296 | 518 | Cross-reactive HIV |
| N90 | 1728 | 75 | 297 | 519 | Cross-reactive HIV |
| N90 | 1567 | 76 | 298 | 520 | Cross-reactive HIV |
| N90 | 1506 | 77 | 299 | 521 | Cross-reactive HIV |
| N90 | 1416 | 78 | 300 | 522 | Cross-reactive HIV |
| N90 | 1027 | 79 | 301 | 523 | Cross-reactive HIV |
| N90 | 934 | 80 | 302 | 524 | Cross-reactive HIV |
| N90 | 652 | 81 | 303 | 525 | Cross-reactive HIV |
| N90 | 624 | 82 | 304 | 526 | Cross-reactive HIV |
| N90 | 431 | 83 | 305 | 527 | Cross-reactive HIV |
| N90 | 350 | 84 | 306 | 528 | Cross-reactive HIV |
| N90 | 3345 | 85 | 307 | 529 | Cross-reactive HIV |
| N90 | 2504 | 86 | 308 | 530 | Cross-reactive HIV |
| N90 | 1753 | 87 | 309 | 531 | Cross-reactive HIV |
| N90 | 1690 | 88 | 310 | 532 | Cross-reactive HIV |
| N90 | 1324 | 89 | 311 | 533 | Cross-reactive HIV |
| N90 | 1314 | 90 | 312 | 534 | Cross-reactive HIV |
| N90 | 155 | 91 | 313 | 535 | Cross-reactive HIV |
| N90 | 1866 | 92 | 314 | 536 | Cross-reactive HIV |
| N90 | 654 | 93 | 315 | 537 | Cross-reactive HIV |
| N90 | 1487 | 94 | 316 | 538 | Cross-reactive HIV |
| N90 | 842 | 95 | 317 | 539 | Cross-reactive HIV |
| N90 | 523 | 96 | 318 | 540 | Cross-reactive HIV |
| N90 | 284 | 97 | 319 | 541 | Cross-reactive HIV |
| N90 | 208 | 98 | 320 | 542 | Cross-reactive HIV |
| N90 | 1149 | 99 | 321 | 543 | Cross-reactive HIV |
| N90 | 1882 | 100 | 322 | 544 | Cross-reactive HIV |
| N90 | 1662 | 101 | 323 | 545 | Cross-reactive HIV |
| N90 | 1572 | 102 | 324 | 546 | Cross-reactive HIV |
| N90 | 404 | 103 | 325 | 547 | Cross-reactive HIV |
| N90 | 2978 | 104 | 326 | 548 | Cross-reactive HIV |
| N90 | 1261 | 105 | 327 | 549 | Cross-reactive HIV |
| N90 | 845 | 106 | 328 | 550 | Cross-reactive HIV |
| N90 | 1125 | 107 | 329 | 551 | Cross-reactive HIV |
| N90 | 3035 | 108 | 330 | 552 | Cross-reactive HIV |
| N90 | 3272 | 109 | 331 | 553 | Cross-reactive HIV |
| N90 | 2759 | 110 | 332 | 554 | Cross-reactive HIV |
| N90 | 2638 | 111 | 333 | 555 | Cross-reactive HIV |
| N90 | 2014 | 112 | 334 | 556 | Cross-reactive HIV |
| N90 | 1824 | 113 | 335 | 557 | Cross-reactive HIV |
| N90 | 1612 | 114 | 336 | 558 | Cross-reactive HIV |
| N90 | 1478 | 115 | 337 | 559 | Cross-reactive HIV |
| N90 | 1422 | 116 | 338 | 560 | Cross-reactive HIV |
| N90 | 942 | 117 | 339 | 561 | Cross-reactive HIV |
| N90 | 818 | 118 | 340 | 562 | Cross-reactive HIV |
| N90 | 445 | 119 | 341 | 563 | Cross-reactive HIV |
| N90 | 183 | 120 | 342 | 564 | Cross-reactive HIV |
| N90 | 30 | 121 | 343 | 565 | Cross-reactive HIV |
| N90 | 29 | 122 | 344 | 566 | Cross-reactive HIV |
| N90 | 3477 | 123 | 345 | 567 | Cross-reactive HIV |
| N90 | 2845 | 124 | 346 | 568 | Cross-reactive HIV |
| N90 | 587 | 125 | 347 | 569 | Cross-reactive HIV |
| N90 | 3330 | 126 | 348 | 570 | Cross-reactive HIV |
| N90 | 3047 | 127 | 349 | 571 | Cross-reactive HIV |
| N90 | 2612 | 128 | 350 | 572 | Cross-reactive HIV |
| N90 | 2148 | 129 | 351 | 573 | Cross-reactive HIV |
| N90 | 1657 | 130 | 352 | 574 | Cross-reactive HIV |
| N90 | 1016 | 131 | 353 | 575 | Cross-reactive HIV |
| N90 | 968 | 132 | 354 | 576 | Cross-reactive HIV |
| N90 | 277 | 133 | 355 | 577 | Cross-reactive HIV |
| N90 | 2309 | 134 | 356 | 578 | Cross-reactive HIV |
| N90 | 3140 | 135 | 357 | 579 | Cross-reactive HIV |
| N90 | 2790 | 136 | 358 | 580 | Cross-reactive HIV |
| N90 | 2726 | 137 | 359 | 581 | Cross-reactive HIV |
| N90 | 1308 | 138 | 360 | 582 | Cross-reactive HIV |
| N90 | 991 | 139 | 361 | 583 | Cross-reactive HIV |
| N90 | 406 | 140 | 362 | 584 | Cross-reactive HIV |
| N90 | 137 | 141 | 363 | 585 | Cross-reactive HIV |
| N90 | 3005 | 142 | 364 | 586 | Cross-reactive HIV |
| N90 | 2745 | 143 | 365 | 587 | Cross-reactive HIV |
| N90 | 3439 | 144 | 366 | 588 | Cross-reactive HIV |
| N90 | 3400 | 145 | 367 | 589 | Cross-reactive HIV |
| N90 | 1921 | 146 | 368 | 590 | Cross-reactive HIV |
| N90 | 1126 | 147 | 369 | 591 | Cross-reactive HIV |
| N90 | 256 | 148 | 370 | 592 | Cross-reactive HIV |
| N90 | 3109 | 149 | 371 | 593 | Cross-reactive HIV |
| N90 | 2967 | 150 | 372 | 594 | Cross-reactive HIV |
| N90 | 2337 | 151 | 373 | 595 | Cross-reactive HIV |
| N90 | 1705 | 152 | 374 | 596 | Cross-reactive HIV |
| N90 | 492 | 153 | 375 | 597 | Cross-reactive HIV |
| N90 | 1479 | 154 | 376 | 598 | Cross-reactive HIV |
| N90 | 2002 | 155 | 377 | 599 | Cross-reactive HIV |
| N90 | 1813 | 156 | 378 | 600 | Cross-reactive HIV |
| N90 | 1048 | 157 | 379 | 601 | Cross-reactive HIV |
| N90 | 931 | 158 | 380 | 602 | Cross-reactive HIV |
| N90 | 460 | 159 | 381 | 603 | Cross-reactive HIV |
| N90 | 245 | 160 | 382 | 604 | Cross-reactive HIV |
| N90 | 3543 | 161 | 383 | 605 | Cross-reactive HIV |
| N90 | 2495 | 162 | 384 | 606 | Cross-reactive HIV |
| N90 | 2294 | 163 | 385 | 607 | Cross-reactive HIV |
| N90 | 91 | 164 | 386 | 608 | Cross-reactive HIV |
| N90 | 2379 | 165 | 387 | 609 | Cross-reactive HIV |
| N90 | 1851 | 166 | 388 | 610 | Cross-reactive HIV |
| N90 | 1357 | 167 | 389 | 611 | Cross-reactive HIV |
| N90 | 129 | 168 | 390 | 612 | Cross-reactive HIV |
| N90 | 48 | 169 | 391 | 613 | Cross-reactive HIV |
| N90 | 1287 | 170 | 392 | 614 | Cross-reactive HIV |
| N90 | 505 | 171 | 393 | 615 | Cross-reactive HIV |
| N90 | 3434 | 172 | 394 | 616 | Cross-reactive HIV |
| N90 | 3260 | 173 | 395 | 617 | Cross-reactive HIV |
| N90 | 51 | 174 | 396 | 618 | Cross-reactive HIV |
| N90 | 3441 | 175 | 397 | 619 | Cross-reactive HIV |
| N90 | 2535 | 176 | 398 | 620 | Cross-reactive HIV |
| N90 | 510 | 177 | 399 | 621 | Cross-reactive HIV |
| N90 | 328 | 178 | 400 | 622 | Cross-reactive HIV |
| N90 | 3497 | 179 | 401 | 623 | Cross-reactive HIV |
| N90 | 1549 | 180 | 402 | 624 | Cross-reactive HIV |
| N90 | 884 | 181 | 403 | 625 | Cross-reactive HIV |
| N90 | 2943 | 182 | 404 | 626 | Cross-reactive HIV |
| N90 | 2487 | 183 | 405 | 627 | Cross-reactive HIV |
| N90 | 1733 | 184 | 406 | 628 | Cross-reactive HIV |
| N90 | 3333 | 185 | 407 | 629 | Cross-reactive HIV |
| N90 | 3087 | 186 | 408 | 630 | Cross-reactive Flu |
| N90 | 1282 | 187 | 409 | 631 | Cross-reactive Flu |
| N90 | 2363 | 188 | 410 | 632 | Cross-reactive Flu |
| N90 | 251 | 189 | 411 | 633 | Cross-reactive Flu |
| N90 | 1849 | 190 | 412 | 634 | Cross-reactive Flu |
| N90 | 3139 | 191 | 413 | 635 | Cross-reactive Flu |
| N90 | 3455 | 192 | 414 | 636 | Cross-reactive Flu |
| N90 | 3180 | 193 | 415 | 637 | Cross-reactive Flu |
| N90 | 1993 | 194 | 416 | 638 | Cross-reactive Flu |
| N90 | 206 | 195 | 417 | 639 | Cross-reactive Flu |
| N90 | 2361 | 196 | 418 | 640 | Cross-reactive Flu |
| N90 | 218 | 197 | 419 | 641 | Cross-reactive Flu |
| N90 | 833 | 198 | 420 | 642 | Cross-reactive Flu |
| N90 | 2976 | 199 | 421 | 643 | Cross-reactive Flu |
| N90 | 2883 | 200 | 422 | 644 | Cross-reactive Flu |
| N90 | 1910 | 201 | 423 | 645 | Cross-reactive Flu |
| N90 | 1724 | 202 | 424 | 646 | Cross-reactive Flu |
| N90 | 377 | 203 | 425 | 647 | Cross-reactive Flu |
| N90 | 1757 | 204 | 426 | 648 | Cross-reactive Flu |
| N90 | 3326 | 205 | 427 | 649 | Cross-reactive Flu |
| N90 | 1864 | 206 | 428 | 650 | Cross-reactive Flu |
| N90 | 2822 | 207 | 429 | 651 | Cross-reactive Flu |
| N90 | 1373 | 208 | 430 | 652 | Cross-reactive Flu |
| N90 | 2709 | 209 | 431 | 653 | Cross-reactive Flu |
| N90 | 2496 | 210 | 432 | 654 | Cross-reactive Flu |
| N90 | 2018 | 211 | 433 | 655 | Cross-reactive Flu |
| N90 | 3505 | 212 | 434 | 656 | Cross-reactive Flu |
| N90 | 2115 | 213 | 435 | 657 | Cross-reactive Flu |
| N90 | 2724 | 214 | 436 | 658 | Cross-reactive Flu |
| N90 | 3436 | 215 | 437 | 659 | Cross-reactive Flu |
| N90 | 2678 | 216 | 438 | 660 | Cross-reactive Flu |
| N90 | 645 | 217 | 439 | 661 | Cross-reactive Flu |
| N90 | 3007 | 218 | 440 | 662 | Cross-reactive Flu |
| N90 | 2539 | 219 | 441 | 663 | Cross-reactive Flu |
| N90 | 1900 | 220 | 442 | 664 | Cross-reactive Flu |
| N90 | 1499 | 221 | 443 | 665 | Cross-reactive Flu |
| N90 | 1367 | 222 | 444 | 666 | Cross-reactive Flu |

TABLE 2
Amino acid sequences for heavy and light chains and the CDRs thereof.

| | SEQ ID | | | | SEQ ID | | | | |
|---|---|---|---|---|---|---|---|---|---|
| | NO for | | | | NO for | | | | |
| | Heavy | SEQ ID | SEQ ID | SEQ ID | Light | SEQ ID | SEQ ID | SEQ ID | |
| mAb | chain | NO for | NO for | NO for | chain | NO for | NO for | NO for | |
| name | aa | CDRH1 | CDRH2 | CDRH3 | aa | CDRL1 | CDRL2 | CDRL3 | Specificity |
| 2723-4872 | 667 | 734 | 761 | 796 | 844 | 852 | 878 | 903 | HIV |
| 3602-2648 | 668 | 721 | 746 | 784 | 830 | 863 | 888 | 897 | HIV |
| 3602-3278 | 668 | 721 | 746 | 784 | 830 | 863 | 888 | 897 | HIV |
| 3602-520 | 668 | 721 | 746 | 784 | 830 | 863 | 888 | 897 | HIV |
| 2723-432 | 669 | 720 | 766 | 774 | 810 | 864 | 882 | 899 | HIV |
| 3602-1483 | 670 | 714 | 744 | 794 | 829 | 862 | 891 | 897 | HIV |
| 3602-1075 | 671 | 719 | 745 | 776 | 815 | 872 | 889 | 898 | HIV |
| 3602-2137 | 672 | 719 | 745 | 776 | 816 | 869 | 889 | 898 | HIV |
| 3602-2199 | 673 | 719 | 745 | 776 | 814 | 866 | 889 | 901 | HIV |
| 3602-3420 | 674 | 722 | 742 | 793 | 831 | 867 | 889 | 894 | HIV |
| 3602-1337 | 675 | 717 | 743 | 793 | 812 | 865 | 889 | 896 | HIV |
| 3602-1494 | 675 | 717 | 743 | 793 | 812 | 865 | 889 | 896 | HIV |
| 3602-1735 | 675 | 717 | 743 | 793 | 812 | 865 | 889 | 896 | HIV |
| 3602-2848 | 675 | 717 | 743 | 793 | 812 | 865 | 889 | 896 | HIV |
| 3602-392 | 675 | 717 | 743 | 793 | 812 | 865 | 889 | 896 | HIV |
| 3602-964 | 675 | 717 | 743 | 793 | 812 | 865 | 889 | 896 | HIV |
| 3602-1544 | 676 | 717 | 743 | 791 | 811 | 865 | 889 | 895 | HIV |
| 3602-1841 | 676 | 715 | 743 | 791 | 811 | 865 | 889 | 895 | HIV |
| 3602-1737 | 677 | 718 | 743 | 793 | 811 | 865 | 889 | 895 | HIV |
| 3602-819 | 677 | 718 | 743 | 785 | 811 | 865 | 889 | 895 | HIV |
| 2723-3862 | 678 | 738 | 751 | 798 | 832 | 855 | 877 | 906 | HIV |
| 2723-5847 | 678 | 738 | 751 | 798 | 833 | 855 | 877 | 906 | HIV |
| 2723-483 | 679 | 736 | 747 | 783 | 827 | 848 | 881 | 908 | HIV |
| 2723-7033 | 680 | 736 | 747 | 783 | 828 | 847 | 880 | 908 | HIV |
| 2723-6307 | 681 | 736 | 747 | 783 | 828 | 847 | 880 | 908 | HIV |
| 2723-4196 | 682 | 736 | 747 | 782 | 825 | 848 | 880 | 908 | HIV |
| 2723-1241 | 683 | 736 | 747 | 783 | 826 | 848 | 881 | 908 | HIV |
| 2723-4559 | 684 | 735 | 748 | 800 | 822 | 850 | 880 | 904 | HIV |
| 3602-870 | 685 | 713 | 749 | 773 | 813 | 851 | 879 | 893 | HIV |
| 3602-1707 | 686 | 723 | 752 | 768 | 809 | 868 | 889 | 900 | flu |
| 2723-2304 | 687 | 725 | 762 | 778 | 818 | 859 | 885 | 913 | HIV |
| 2723-422 | 688 | 726 | 763 | 780 | 817 | 859 | 885 | 913 | HIV |
| 2723-3415 | 689 | 739 | 753 | 777 | 819 | 860 | 878 | 909 | flu |
| 2723-2120 | 690 | 727 | 741 | 775 | 834 | 873 | 884 | 916 | HIV |
| 2723-2121 | 691 | 728 | 767 | 779 | 821 | 871 | 883 | 912 | HIV |
| 2723-1952 | 692 | 740 | 756 | 781 | 808 | 870 | 887 | 892 | HIV |
| 2723-3196 | 693 | 716 | 764 | 790 | 807 | 857 | 879 | 914 | HIV |
| 2723-2859 | 694 | 724 | 757 | 799 | 820 | 861 | 883 | 910 | flu |
| 2723-5469 | 695 | 730 | 758 | 787 | 839 | 876 | 890 | 911 | HIV |
| 2723-293 | 696 | 731 | 760 | 788 | 835 | 874 | 890 | 911 | HIV |
| 2723-4186 | 696 | 731 | 760 | 788 | 840 | 858 | 890 | 911 | HIV |
| 2723-2540 | 697 | 733 | 765 | 786 | 838 | 876 | 890 | 911 | HIV |
| 2723-3244 | 698 | 732 | 758 | 788 | 837 | 875 | 890 | 911 | HIV |
| 2723-6220 | 699 | 732 | 758 | 789 | 837 | 875 | 890 | 911 | HIV |
| 2723-5655 | 700 | 732 | 758 | 788 | 837 | 875 | 890 | 911 | HIV |
| 2723-6684 | 701 | 731 | 760 | 788 | 836 | 874 | 890 | 911 | HIV |
| 2723-2624 | 702 | 729 | 750 | 792 | 841 | 853 | 886 | 915 | HIV |
| 2723-5479 | 703 | 729 | 750 | 792 | 842 | 853 | 886 | 915 | HIV |
| 2723-3069 | 704 | 737 | 759 | 801 | 824 | 849 | 880 | 905 | HIV |
| 2723-4975 | 704 | 737 | 759 | 801 | 823 | 846 | 880 | 905 | HIV |
| 2723-6609 | 704 | 737 | 759 | 801 | 823 | 846 | 880 | 905 | HIV |
| 2723-3055 | 705 | 729 | 761 | 795 | 843 | 853 | 886 | 902 | HIV |
| 2723-3131 | 706 | 712 | 754 | 772 | 806 | 856 | 883 | 907 | HIV |
| 2723-4886 | 707 | 712 | 754 | 769 | 802 | 856 | 883 | 907 | HIV |
| 2723-4509 | 708 | 712 | 755 | 770 | 804 | 856 | 883 | 907 | HIV |
| 2723-1879 | 709 | 712 | 755 | 771 | 803 | 856 | 883 | 907 | HIV |
| 2723-229 | 710 | 712 | 755 | 770 | 805 | 856 | 883 | 907 | HIV |
| 2723-6245 | 711 | 734 | 761 | 797 | 845 | 854 | 885 | 903 | HIV |

TABLE 3
Sequences in FIG. 2.

| SEQ ID | | SEQ ID | |
|---|---|---|---|
| NO | CDRH3 | NO | CDRL3 |
| 770 | AMRDYCRDDNCNKWDLRH | 907 | QHRET |
| 771 | AMRDYCRDDNCNRWDLRH | 907 | QHRET |
| 917 | AMRDYCRDDSCNIWDLRH | 907 | QHRET |
| 918 | AMRDYCRDDNCNIWDLRH | 907 | QHRET |
| 919 | VRTAYCERDPCKGWVFPH | 906 | QFLEN |
| 920 | VRRFVCDHCSDYTFGH | 904 | QDQEF |
| 921 | VRRGHCDHCYEWTLQH | 905 | QDRQS |
| 922 | VRRGSCDYCGDFPWQY | 908 | QQFEF |
| 923 | VRRGSCGYCGDFPWQY | 908 | QQFEF |
| 924 | VRGSSCCGGRRHCNGADCFNWDFQY | 903 | QCLEA |
| 925 | VRGRSCCGGRRHCNGADCFNWDFQY | 903 | QCLEA |
| 926 | VRGKSCCGGRRYCNGADCFNWDFEH | 915 | QSFEG |
| 927 | VRGRSCCDGRRYCNGADCFNWDFEH | 902 | QCFEG |
| 928 | TRGKYCTARDYYNWDFEH | 911 | QQYEF |
| 929 | TRGKYCTARDYYNWDFEY | 911 | QQYEF |
| 930 | TRGKNCDDNWDFEH | 911 | QQYEF |
| 931 | TRGKNCNYNWDFEH | 911 | QQYEF |

TABLE 4
Additional sequences in FIG. 2.

| SEQ | | SEQ | |
|---|---|---|---|
| ID | | ID | VJ |
| NO | VDJ Junction | NO | junction |
| 939 | ARHRADYDFWNGNNLRGYFDP | 912 | QQYGSSPTT |
| 940 | ARHRANYDFWGGSNLRGYFDP | 913 | QQYGTSPTT |
| 941 | ARHRADYDFWGGSNLRGYFDP | 913 | QQYGTSPTT |
| 942 | ARDEVLRGSASWFLGPNEVRHYGMDV | 899 | MQSLQLRS |
| 943 | VGRQKYISGNVGDFDF | 914 | QQYTNLPPALN |
| 944 | ATGRIAASGFYFQH | 892 | HHYNSFSHT |
| 775 | AREHTMIFGVAEGFWFDP | 916 | SSRDTDDISVI |
| 945 | VTMSGYHVSNTYLDA | 910 | QQYANSPLT |
| 946 | ARGRVYSDY | 909 | QQSGTSPPWT |

TABLE 5
Sequences in FIG. 3.

| SEQ ID NO | CDRH3 | SEQ ID NO | CDRL3 |
|---|---|---|---|
| 932 | VRGPSSGWWYHEYSGLDV | 897 | MQARQTPRLS |
| 933 | IRGPESGWFYHYYFGLGV | 897 | MQARQTPRLS |
| 934 | ARGPSSGWHLHYYFGMGL | 937 | MQSLETPRLS |
| 934 | ARGPSSGWHLHYYFGMGL | 938 | MQSLQTPRLS |
| 935 | VRGPSSGWHLHYYFGMDL | 894 | MEALQTPRLT |
| 935 | VRGPSSGWHLHYYFGMDL | 896 | METLQTPRLT |
| 935 | VRGPSSGWHLHYYFGMDL | 895 | MESLQTPRLT |
| 936 | VRGASSGWHLHYYFGMDL | 895 | MESLQTPRLT |

TABLE 6
Additional sequences in FIG. 3.

| SEQ ID | | SEQ ID | |
|---|---|---|---|
| NO | VDJ Junction | NO | VJ junction |
| 947 | ARDAGERGLRGYSVGFFDS | 893 | HQYGTTPYT |
| 948 | AKVVAGGQLRYFDWQEGHYYGMDV | 900 | MQSLQTPHS |

[0241] Unless defined otherwise, all technical and scientific terms used herein have the same meanings as commonly understood by one of skill in the art to which the disclosed invention belongs. Publications cited herein and the materials for which they are cited are specifically incorporated by reference.

[0242] Those skilled in the art will appreciate that numerous changes and modifications can be made to the preferred embodiments of the invention and that such changes and modifications can be made without departing from the spirit of the invention. It is, therefore, intended that the appended claims cover all such equivalent variations as fall within the true spirit and scope of the invention.

1. A method for simultaneous detection of an antigen and an antibody that specifically binds said antigen, comprising:
labeling a plurality of antigens with unique antigen barcodes;
providing a plurality of barcode-labeled antigens to a population of B-cells;
allowing the plurality of barcode-labeled antigens to bind to the population of B-cells;
washing unbound antigens from the population of B-cells;
separating the B-cells into single cell emulsions;
introducing into each single cell emulsion a unique cell barcode-labeled bead;
preparing a single cell cDNA library from the single cell emulsions;
performing PCR amplification reactions to produce a plurality of amplicons, wherein the amplicons comprise: 1) the cell barcode and the antigen barcode, 2) the cell barcode and an antibody sequence, and 3) a unique molecular identifier (UMI);
sequencing the plurality of amplicons;
removing a sequence lacking the cell barcode, the UMI, or the antigen barcode;
aligning the antibody sequence to a reference library of immunoglobulin V, D, J and C sequences;
constructing a UMI count matrix comprising the cell barcode, the antigen barcode, and the antibody sequence;
determining a LIBRA-seq score; and
determining that the antibody specifically binds an antigen if the LIBRA-seq score of the antibody for the antigen is increased in comparison to a control sample.

2. The method of claim 1, wherein the barcode-labeled antigens are labeled with a first barcode comprising a DNA sequence or an RNA sequence.

3. The method of claim 1, wherein the cell barcode-labeled beads are labeled with a second barcode comprising a DNA sequence or an RNA sequence.

4. The method of claim 1, wherein the antibody sequence comprises an immunoglobulin heavy chain (VDJ) sequence, or an immunoglobulin light chain (VJ) sequence.

5. The method of claim 1, wherein the barcode-labeled antigens comprise an antigen from a pathogen or an animal.

6. The method of claim 5, wherein the antigen from a pathogen comprises an antigen from a virus.

7. The method of claim 6, wherein the antigen from a virus comprises an antigen from human immunodeficiency virus (HIV), an antigen from influenza virus, or an antigen from respiratory syncytial virus (RSV).

8. The method of claim 1, further comprising determining a level of somatic hypermutation of the antibody specifically binding to the antigen.

9. The method of claim 1, further comprising determining a length of a complementarity-determining region (CDR) of the antibody specifically binding to the antigen.

10. The method of claim 1, further comprising determining a motif of a CDR of the antibody specifically binding to the antigen.

11. The method of claim 9, wherein the CDR is selected from the group consisting of CDRH1, CDRH2, CDRH3, CDRL1, CDRL2, and CDRL3.

12. A method of determining a broadly neutralizing antibody to a pathogen, said method comprising:
labeling a plurality of antigens derived from the pathogen with unique antigen barcodes;
providing a plurality of barcode-labeled antigens to a population of B-cells;
allowing the plurality of barcode-labeled antigens to bind to the population of B-cells;
washing unbound antigens from the population of B-cells;
separating the B-cells into single cell emulsions;
introducing into each single cell emulsion a unique cell barcode-labeled bead;
preparing a single cell cDNA library from the single cell emulsions;
performing PCR amplification reactions to produce a plurality of amplicons, wherein the amplicons comprise: 1) the cell barcode and the antigen barcode, 2) the cell barcode and an antibody sequence, and 3) a unique molecular identifier (UMI);
sequencing the plurality of amplicons;
removing a sequence lacking a cell barcode, unique molecular identifier (UMI), or an antigen barcode;
aligning the antibody sequence to a reference library of immunoglobulin V, D, J and C sequences;
constructing a UMI count matrix comprising the cell barcode, the antigen barcode, and the antibody sequence;
determining a LIBRA-seq score; and
determining that the antibody is a broadly neutralizing antibody if the LIBRA-seq scores of the antibody for two or more antigens are increased in comparison to a control.

13. The method of claim 12, wherein the barcode-labeled antigens are labeled with a first barcode comprising a DNA sequence or an RNA sequence.

14. The method of claim 12, wherein the cell barcode-labeled beads are labeled with a second barcode comprising a DNA sequence or an RNA sequence.

15. The method of claim 12, wherein the antibody sequence comprises an immunoglobulin heavy chain (VDJ) sequence, or an immunoglobulin light chain (VJ) sequence.

16. The method of claim 12, wherein the barcode-labeled antigens comprise an antigen from a pathogen or an animal.

17. The method of claim 16, wherein the antigen from a pathogen comprises an antigen from a virus.

18. The method of claim 17, wherein the antigen from a virus comprises an antigen from human immunodeficiency virus (HIV), an antigen from influenza virus, or an antigen from respiratory syncytial virus (RSV).

19. The method of claim 12, further comprising determining a level of somatic hypermutation of the antibody specifically binding to the antigen.

20. The method of claim 12, further comprising determining a length of a complementarity-determining region (CDR) of the antibody specifically binding to the antigen.

21. The method of claim 12, further comprising determining a motif of a CDR of the antibody specifically binding to the antigen.

22. The method of claim 20, wherein the CDR is selected from the group consisting of CDRH1, CDRH2, CDRH3, CDRL1, CDRL2, and CDRL3.

The application's sequence listing, which the Patent Office published only in electronic form, follows.

SEQUENCE LISTING (962 sequences)

SEQ ID NO: 1 - DNA, 16 bp, Artificial Sequence
  Synthetic construct
agctctcgttaccagt

SEQ ID NO: 2 - DNA, 16 bp, Artificial Sequence
  Synthetic construct
ctcgtcagtctaacgt

SEQ ID NO: 3 - DNA, 16 bp, Artificial Sequence
  Synthetic construct
tcgggacagccgattt

SEQ ID NO: 4 - DNA, 16 bp, Artificial Sequence
  Synthetic construct
gatgctatcgaactgt

SEQ ID NO: 5 - DNA, 16 bp, Artificial Sequence
  Synthetic construct
agggagtgtctcttat

SEQ ID NO: 6 - DNA, 16 bp, Artificial Sequence
  Synthetic construct
tgagcatagaaggtga

SEQ ID NO: 7 - DNA, 16 bp, Artificial Sequence
  Synthetic construct
agaatagtcacctcgt

SEQ ID NO: 8 - DNA, 16 bp, Artificial Sequence
  Synthetic construct
aaccatgtcccaagta

SEQ ID NO: 9 - DNA, 16 bp, Artificial Sequence
  Synthetic construct
tcaggtacatgcatgt

SEQ ID NO: 10 - DNA, 16 bp, Artificial Sequence
  Synthetic construct
acgccgagtacaagta

SEQ ID NO: 11 - DNA, 16 bp, Artificial Sequence
  Synthetic construct
gactgcgcacggttta

SEQ ID NO: 12 - DNA, 16 bp, Artificial Sequence
  Synthetic construct
gtcgtaacaatgttgc

SEQ ID NO: 13 - DNA, 16 bp, Artificial Sequence
  Synthetic construct
tgccctatcgacagcc

SEQ ID NO: 14 - DNA, 16 bp, Artificial Sequence
  Synthetic construct
ggaaagctcgtacggc

SEQ ID NO: 15 - DNA, 16 bp, Artificial Sequence
  Synthetic construct
ggatgttcacatgtgt

SEQ ID NO: 16 - DNA, 16 bp, Artificial Sequence
  Synthetic construct
cgtgtaatcacgatgt

SEQ ID NO: 17 - DNA, 16 bp, Artificial Sequence
  Synthetic construct
taagtgccatccgcga

SEQ ID NO: 18 - DNA, 16 bp, Artificial Sequence
  Synthetic construct
gctctgttctagcaca

SEQ ID NO: 19 - DNA, 16 bp, Artificial Sequence
  Synthetic construct
gactacaagttaggta

SEQ ID NO: 20 - DNA, 16 bp, Artificial Sequence
  Synthetic construct
caggtgctcactcctg

SEQ ID NO: 21 - DNA, 16 bp, Artificial Sequence
  Synthetic construct
cattatcagctgcaag

SEQ ID NO: 22 - DNA, 16 bp, Artificial Sequence
  Synthetic construct
ggtgcgtcaatagcaa

SEQ ID NO: 23 - DNA, 16 bp, Artificial Sequence
  Synthetic construct
gcagttacaccgctag

SEQ ID NO: 24 - DNA, 16 bp, Artificial Sequence
  Synthetic construct
ctttgcgcagacaggt

SEQ ID NO: 25 - DNA, 16 bp, Artificial Sequence
  Synthetic construct
agcagcctccctcttt

SEQ ID NO: 26 - DNA, 16 bp, Artificial Sequence
  Synthetic construct
tgggaagcacctcgga

SEQ ID NO: 27 - DNA, 16 bp, Artificial Sequence
  Synthetic construct
gctcctaagcgaaggg

SEQ ID NO: 28 - DNA, 16 bp, Artificial Sequence
  Synthetic construct
acgaggacagggattg

SEQ ID NO: 29 - DNA, 16 bp, Artificial Sequence
  Synthetic construct
tgatttctcgttgaca

SEQ ID NO: 30 - DNA, 16 bp, Artificial Sequence
  Synthetic construct
gtcctcatcggcatcg

SEQ ID NO: 31 - DNA, 16 bp, Artificial Sequence
  Synthetic construct
ggtgttagttagtggg

SEQ ID NO: 32 - DNA, 16 bp, Artificial Sequence
  Synthetic construct
ctcgtcatcagagacg

SEQ ID NO: 33 - DNA, 16 bp, Artificial Sequence
  Synthetic construct
cagtaaccagtgacag

SEQ ID NO: 34 - DNA, 16 bp, Artificial Sequence
  Synthetic construct
cctagctgtctcttat

SEQ ID NO: 35 - DNA, 16 bp, Artificial Sequence
  Synthetic construct
agcttgaagaaaccgc

SEQ ID NO: 36 - DNA, 16 bp, Artificial Sequence
  Synthetic construct
tacttaccaacacccg

SEQ ID NO: 37 - DNA, 16 bp, Artificial Sequence
  Synthetic construct
cttaccgtcatgtctt

SEQ ID NO: 38 - DNA, 16 bp, Artificial Sequence
  Synthetic construct
ccagcgacaagttgtc

SEQ ID NO: 39 - DNA, 16 bp, Artificial Sequence
  Synthetic construct
gggtctgcaagacgtg

SEQ ID NO: 40 - DNA, 16 bp, Artificial Sequence
  Synthetic construct
cacatttgtcttgatg

SEQ ID NO: 41 - DNA, 16 bp, Artificial Sequence
  Synthetic construct
tggttagagaaacgag

SEQ ID NO: 42 - DNA, 16 bp, Artificial Sequence
  Synthetic construct
cttaggatcgtctgaa

SEQ ID NO: 43 - DNA, 16 bp, Artificial Sequence
  Synthetic construct
ctcagaacacattagc

SEQ ID NO: 44 - DNA, 16 bp, Artificial Sequence
  Synthetic construct
ctacgtctcgtaggag

SEQ ID NO: 45 - DNA, 16 bp, Artificial Sequence
  Synthetic construct
cgatggcgtccgtcag

SEQ ID NO: 46 - DNA, 16 bp, Artificial Sequence
  Synthetic construct
cagctaatcagagacg

SEQ ID NO: 47 - DNA, 16 bp, Artificial Sequence
  Synthetic construct
gaacctatcaaagtag

SEQ ID NO: 48 - DNA, 16 bp, Artificial Sequence
  Synthetic construct
cgccaagtcggttaac

SEQ ID NO: 49 - DNA, 16 bp, Artificial Sequence
  Synthetic construct
gcagttaagtcatgct

SEQ ID NO: 50 - DNA, 16 bp, Artificial Sequence
  Synthetic construct
actgagttcattgcga

SEQ ID NO: 51 - DNA, 16 bp, Artificial Sequence
  Synthetic construct
tttgcgctcgcatgat

SEQ ID NO: 52 - DNA, 16 bp, Artificial Sequence
  Synthetic construct
tgagccgtcactgggc

SEQ ID NO: 53 - DNA, 16 bp, Artificial Sequence
  Synthetic construct
tgagccggtctcttta

SEQ ID NO: 54 - DNA, 16 bp, Artificial Sequence
  Synthetic construct
tcagatgagcgcctca

SEQ ID NO: 55 - DNA, 16 bp, Artificial Sequence
  Synthetic construct
aaggttcagagttggc

SEQ ID NO: 56 - DNA, 16 bp, Artificial Sequence
  Synthetic construct
ggagcaagtgatgccc

SEQ ID NO: 57 - DNA, 16 bp, Artificial Sequence
  Synthetic construct
cgccaaggtaacgcga

SEQ ID NO: 58 - DNA, 16 bp, Artificial Sequence
  Synthetic construct
caccttgagtagtgcg

SEQ ID NO: 59 - DNA, 16 bp, Artificial Sequence
  Synthetic construct
caaggccagcaatatg

SEQ ID NO: 60 - DNA, 16 bp, Artificial Sequence
  Synthetic construct
actgaactctgtttgt

SEQ ID NO: 61 - DNA, 16 bp, Artificial Sequence
  Synthetic construct
acggccacagctgtta

SEQ ID NO: 62 - DNA, 16 bp, Artificial Sequence
  Synthetic construct
ttgccgtgtacatgtc

SEQ ID NO: 63 - DNA, 16 bp, Artificial Sequence
  Synthetic construct
tcgtacccaccgaatt

SEQ ID NO: 64 - DNA, 16 bp, Artificial Sequence
  Synthetic construct
ggacattcacagacag

SEQ ID NO: 65 - DNA, 16 bp, Artificial Sequence
  Synthetic construct
gcatgcggtggaaaga

SEQ ID NO: 66 - DNA, 16 bp, Artificial Sequence
  Synthetic construct
cttaccgagggcttcc

SEQ ID NO: 67 - DNA, 16 bp, Artificial Sequence
  Synthetic construct
actgtcctccttggtc

SEQ ID NO: 68 - DNA, 16 bp, Artificial Sequence
  Synthetic construct
acgatgtagctaacaa

SEQ ID NO: 69 - DNA, 16 bp, Artificial Sequence
  Synthetic construct
acaccaacaccgatat

SEQ ID NO: 70 - DNA, 16 bp, Artificial Sequence
  Synthetic construct
ttaggcacacctcgtt

SEQ ID NO: 71 - DNA, 16 bp, Artificial Sequence
  Synthetic construct
gacacgcgtgtgtgcc

SEQ ID NO: 72 - DNA, 16 bp, Artificial Sequence
  Synthetic construct
gaatgaacattacctt

SEQ ID NO: 73 - DNA, 16 bp, Artificial Sequence
  Synthetic construct
gaagcagtcatagcac

SEQ ID NO: 74 - DNA, 16 bp, Artificial Sequence
  Synthetic construct
ctgcggagtatcagtc

SEQ ID NO: 75 - DNA, 16 bp, Artificial Sequence
  Synthetic construct
ctcgaggcatcggtta

SEQ ID NO: 76 - DNA, 16 bp, Artificial Sequence
  Synthetic construct
cgtccatgtgttaaga

SEQ ID NO: 77 - DNA, 16 bp, Artificial Sequence
  Synthetic construct
cggctagtcagcttag

SEQ ID NO: 78 - DNA, 16 bp, Artificial Sequence
  Synthetic construct
cgatgtaagactaagt

SEQ ID NO: 79 - DNA, 16 bp, Artificial Sequence
  Synthetic construct
cagccgatcagagctt

SEQ ID NO: 80 - DNA, 16 bp, Artificial Sequence
  Synthetic construct
cacactcgtatagggc

SEQ ID NO: 81 - DNA, 16 bp, Artificial Sequence
  Synthetic construct
aggtccgagcaccgct

SEQ ID NO: 82 - DNA, 16 bp, Artificial Sequence
  Synthetic construct
agggagtgtactcgcg

SEQ ID NO: 83 - DNA, 16 bp, Artificial Sequence
  Synthetic construct
actatctcatatacgc

SEQ ID NO: 84 - DNA, 16 bp, Artificial Sequence
  Synthetic construct
acgcagctcagcatgt

SEQ ID NO: 85 - DNA, 16 bp, Artificial Sequence
  Synthetic construct
tggctggtcttgggta

SEQ ID NO: 86 - DNA, 16 bp, Artificial Sequence
  Synthetic construct
gggcatcgttatccga

SEQ ID NO: 87 - DNA, 16 bp, Artificial Sequence
  Synthetic construct
ctcgtacagcaggtca

SEQ ID NO: 88 - DNA, 16 bp, Artificial Sequence
  Synthetic construct
ctcacactcttgtcat

SEQ ID NO: 89 - DNA, 16 bp, Artificial Sequence
  Synthetic construct
cctttctcacggtaga

SEQ ID NO: 90 - DNA, 16 bp, Artificial Sequence
  Synthetic construct
ccttcgaaggcagtca

SEQ ID NO: 91 - DNA, 16 bp, Artificial Sequence
  Synthetic construct
aagccgctcaccacct

SEQ ID NO: 92 - DNA, 16 bp, Artificial Sequence
  Synthetic construct
ctgctgttcctttcgg

SEQ ID NO: 93 - DNA, 16 bp, Artificial Sequence
  Synthetic construct
aggtccgagcttcgcg

SEQ ID NO: 94 - DNA, 16 bp, Artificial Sequence
  Synthetic construct
cggagctcaataacga

SEQ ID NO: 95 - DNA, 16 bp, Artificial Sequence
  Synthetic construct
caacctccagacgtag

SEQ ID NO: 96 - DNA, 16 bp, Artificial Sequence
  Synthetic construct
agattgctcagataag

SEQ ID NO: 97 - DNA, 16 bp, Artificial Sequence
  Synthetic construct
accagtagtgataagt

SEQ ID NO: 98 - DNA, 16 bp, Artificial Sequence
  Synthetic construct
aatccagtcttgaggt

SEQ ID NO: 99 - DNA, 16 bp, Artificial Sequence
  Synthetic construct
cattcgcagtccgtat

SEQ ID NO: 100 - DNA, 16 bp, Artificial Sequence
  Synthetic construct
cttaccgagcccaatt

SEQ ID NO: 101 - DNA, 16 bp, Artificial Sequence
  Synthetic construct
ctagagtagaggtaga

SEQ ID NO: 102 - DNA, 16 bp, Artificial Sequence
  Synthetic construct
cgtctaccatgtagtc

SEQ ID NO: 103 - DNA, 16 bp, Artificial Sequence
  Synthetic construct
acgggcttctacgagt

SEQ ID NO: 104 - DNA, 16 bp, Artificial Sequence
  Synthetic construct
tcacgaagtatatccg

SEQ ID NO: 105 - DNA, 16 bp, Artificial Sequence
  Synthetic construct
ccgttcacaaagtcaa

SEQ ID NO: 106 - DNA, 16 bp, Artificial Sequence
  Synthetic construct
caacctccagcttcgg

SEQ ID NO: 107 - DNA, 16 bp, Artificial Sequence
  Synthetic construct
catcggggtttcgctc

SEQ ID NO: 108 - DNA, 16 bp, Artificial Sequence
  Synthetic construct
tcatttgagcccagct

SEQ ID NO: 109 - DNA, 16 bp, Artificial Sequence
  Synthetic construct
tgccctagtgactcat

SEQ ID NO: 110 - DNA, 16 bp, Artificial Sequence
  Synthetic construct
gttacagcacaggcct

SEQ ID NO: 111 - DNA, 16 bp, Artificial Sequence
  Synthetic construct
gtcacaatctatcgcc

SEQ ID NO: 112 - DNA, 16 bp, Artificial Sequence
  Synthetic construct
gacctggcacgaagca

SEQ ID NO: 113 - DNA, 16 bp, Artificial Sequence
  Synthetic construct
ctgatagtctgctgtc

SEQ ID NO: 114 - DNA, 16 bp, Artificial Sequence
  Synthetic construct
cgttgggtctcgatga

SEQ ID NO: 115 - DNA, 16 bp, Artificial Sequence
  Synthetic construct
cggacacgtcattagc

SEQ ID NO: 116 - DNA, 16 bp, Artificial Sequence
  Synthetic construct
cgatgtagttgattcg

SEQ ID NO: 117 - DNA, 16 bp, Artificial Sequence
  Synthetic construct
cacaggctcttgacga

SEQ ID NO: 118 - DNA, 16 bp, Artificial Sequence
  Synthetic construct
attggactcttaccgc

SEQ ID NO: 119 - DNA, 16 bp, Artificial Sequence
  Synthetic construct
actgagtagctaacaa

SEQ ID NO: 120 - DNA, 16 bp, Artificial Sequence
  Synthetic construct
aaggttcgtctaggtt

SEQ ID NO: 121 - DNA, 16 bp, Artificial Sequence
  Synthetic construct
aaagcaagtggaaaga

SEQ ID NO: 122 - DNA, 16 bp, Artificial Sequence
  Synthetic construct
aaagcaagtagattag

SEQ ID NO: 123 - DNA, 16 bp, Artificial Sequence
  Synthetic construct
ttgaacgtctggagcc

SEQ ID NO: 124 - DNA, 16 bp, Artificial Sequence
  Synthetic construct
tacggataggcgacat

SEQ ID NO: 125 - DNA, 16 bp, Artificial Sequence
  Synthetic construct
agctctctccgtagta

SEQ ID NO: 126 - DNA, 16 bp, Artificial Sequence
  Synthetic construct
tggccaggtgacaaat

SEQ ID NO: 127 - DNA, 16 bp, Artificial Sequence
  Synthetic construct
tccacaccatggatgg

SEQ ID NO: 128 - DNA, 16 bp, Artificial Sequence
  Synthetic construct
gtatcttagtatgaca

SEQ ID NO: 129 - DNA, 16 bp, Artificial Sequence
  Synthetic construct
gatgaaatcagtacgt

SEQ ID NO: 130 - DNA, 16 bp, Artificial Sequence
  Synthetic construct
ctacccaagttgagat

SEQ ID NO: 131 - DNA, 16 bp, Artificial Sequence
  Synthetic construct
cagcatacagctggct

SEQ ID NO: 132 - DNA, 16 bp, Artificial Sequence
  Synthetic construct
caccaggagaatctcc

SEQ ID NO: 133 - DNA, 16 bp, Artificial Sequence
  Synthetic construct
accagtacaaagtcaa

SEQ ID NO: 134 - DNA, 16 bp, Artificial Sequence
  Synthetic construct
gctctgtgtaggcatg

SEQ ID NO: 135 - DNA, 16 bp, Artificial Sequence
  Synthetic construct
tctggaatcatgcatg

SEQ ID NO: 136 - DNA, 16 bp, Artificial Sequence
  Synthetic construct
taaaccgtcgctgata

SEQ ID NO: 137 - DNA, 16 bp, Artificial Sequence
  Synthetic construct
gtgcggtcaggtgcct

SEQ ID NO: 138 - DNA, 16 bp, Artificial Sequence
  Synthetic construct
ccttacgagtagtgcg

SEQ ID NO: 139 - DNA, 16 bp, Artificial Sequence
  Synthetic construct
cactccacattgtgca

SEQ ID NO: 140 - DNA, 16 bp, Artificial Sequence
  Synthetic construct
acgggtcaggtgcaca

SEQ ID NO: 141 - DNA, 16 bp, Artificial Sequence
  Synthetic construct
aactggttcagcaact

SEQ ID NO: 142 - DNA, 16 bp, Artificial Sequence
  Synthetic construct
tcagctcgtcagaggt

SEQ ID NO: 143 - DNA, 16 bp, Artificial Sequence
  Synthetic construct
gtgttaggttccatga

SEQ ID NO: 144 - DNA, 16 bp, Artificial Sequence
  Synthetic construct
ttcggtcagaaagtgg

SEQ ID NO: 145 - DNA, 16 bp, Artificial Sequence
  Synthetic construct
ttaactcgtgatgtgg

SEQ ID NO: 146 - DNA, 16 bp, Artificial Sequence
  Synthetic construct
ctttgcgaggcatggt

SEQ ID NO: 147 - DNA, 16 bp, Artificial Sequence
  Synthetic construct
catgacacaatggagc

SEQ ID NO: 148 - DNA, 16 bp, Artificial Sequence
  Synthetic construct
acagctatccagagga

SEQ ID NO: 149 - DNA, 16 bp, Artificial Sequence
  Synthetic construct
tctattggtatagggc

SEQ ID NO: 150 - DNA, 16 bp, Artificial Sequence
  Synthetic construct
tcacaagagctttggt

SEQ ID NO: 151 - DNA, 16 bp, Artificial Sequence
  Synthetic construct
gctgcgagtgctgtat

SEQ ID NO: 152 - DNA, 16 bp, Artificial Sequence
  Synthetic construct
ctcattatctgcccta

SEQ ID NO: 153 - DNA, 16 bp, Artificial Sequence
  Synthetic construct
agaatagtcctacaga

SEQ ID NO: 154 - DNA, 16 bp, Artificial Sequence
  Synthetic construct
cggacgtcatcagtca

SEQ ID NO: 155 - DNA, 16 bp, Artificial Sequence
  Synthetic construct
gacagagcatactctt

SEQ ID NO: 156 - DNA, 16 bp, Artificial Sequence
  Synthetic construct
ctgaagttctgggcca

SEQ ID NO: 157 - DNA, 16 bp, Artificial Sequence
  Synthetic construct
cagctggtcgtttatc

SEQ ID NO: 158 - DNA, 16 bp, Artificial Sequence
  Synthetic construct
cacactcagggtctcc

SEQ ID NO: 159 - DNA, 16 bp, Artificial Sequence
  Synthetic construct
actgctcgttcccgag

SEQ ID NO: 160 - DNA, 16 bp, Artificial Sequence
  Synthetic construct
acactgacaagctgag

SEQ ID NO: 161 - DNA, 16 bp, Artificial Sequence
  Synthetic construct
tttgcgcgtcgattgt

SEQ ID NO: 162 - DNA, 16 bp, Artificial Sequence
  Synthetic construct
gggatgaagacctttg

SEQ ID NO: 163 - DNA, 16 bp, Artificial Sequence
  Synthetic construct
gcgggtttcatgctcc

SEQ ID NO: 164 - DNA, 16 bp, Artificial Sequence
  Synthetic construct
aaccgcggttgtcgcg

SEQ ID NO: 165 - DNA, 16 bp, Artificial Sequence
  Synthetic construct
gcttgaacacacgctg

SEQ ID NO: 166 - DNA, 16 bp, Artificial Sequence
  Synthetic construct
ctgcggagttccacgg

SEQ ID NO: 167 - DNA, 16 bp, Artificial Sequence
  Synthetic construct
cgaatgttccgtaggc

SEQ ID NO: 168 - DNA, 16 bp, Artificial Sequence
  Synthetic construct
aactggtagcgccttg

SEQ ID NO: 169 - DNA, 16 bp, Artificial Sequence
  Synthetic construct
aaatgccagtatgaca

SEQ ID NO: 170 - DNA, 16 bp, Artificial Sequence
  Synthetic construct
cctattaagcgccttg

SEQ ID NO: 171 - DNA, 16 bp, Artificial Sequence
  Synthetic construct
agagcttcaatcggtt

SEQ ID NO: 172 - DNA, 16 bp, Artificial Sequence
  Synthetic construct
ttcgaagagagggata

SEQ ID NO: 173 - DNA, 16 bp, Artificial Sequence
  Synthetic construct
tgcacctagcgtctat

SEQ ID NO: 174 - DNA, 16 bp, Artificial Sequence
  Synthetic construct
aaatgcccatgggaac

SEQ ID NO: 175 - DNA, 16 bp, Artificial Sequence
  Synthetic construct
ttcggtccagaagcac

SEQ ID NO: 176 - DNA, 16 bp, Artificial Sequence
  Synthetic construct
ggtgaagtcggaaacg

SEQ ID NO: 177 - DNA, 16 bp, Artificial Sequence
  Synthetic construct
agatctgagaggacgg

SEQ ID NO: 178 - DNA, 16 bp, Artificial Sequence
  Synthetic construct
acgataccaatcacac

SEQ ID NO: 179 - DNA, 16 bp, Artificial Sequence
  Synthetic construct
ttgcgtcagggttccc

SEQ ID NO: 180 - DNA, 16 bp, Artificial Sequence
  Synthetic construct
cgtcactcatgcaact

SEQ ID NO: 181 - DNA, 16 bp, Artificial Sequence
  Synthetic construct
caagatccaatccaac

SEQ ID NO: 182 - DNA, 16 bp, Artificial Sequence
  Synthetic construct
tatgccccactcaggc

SEQ ID NO: 183 - DNA, 16 bp, Artificial Sequence
  Synthetic construct
gggacctgtcattagc

SEQ ID NO: 184 - DNA, 16 bp, Artificial Sequence
  Synthetic construct
ctcggagcacacatgt

SEQ ID NO: 185 - DNA, 16 bp, Artificial Sequence
  Synthetic construct
tggccaggtttagctg

SEQ ID NO: 186 - DNA, 16 bp, Artificial Sequence
  Synthetic construct
tcggtaagtgtgcgtc

SEQ ID NO: 187 - DNA, 16 bp, Artificial Sequence
  Synthetic construct
cctagctagagactat

SEQ ID NO: 188 - DNA, 16 bp, Artificial Sequence
  Synthetic construct
gcttccaagagactta

SEQ ID NO: 189 - DNA, 16 bp, Artificial Sequence
  Synthetic construct
acagccgtcccgactt

SEQ ID NO: 190 - DNA, 16 bp, Artificial Sequence
  Synthetic construct
ctgcggagtggcccta

SEQ ID NO: 191 - DNA, 16 bp, Artificial Sequence
  Synthetic construct
tctggaacaatggacg

SEQ ID NO: 192 - DNA, 16 bp, Artificial Sequence
  Synthetic construct
ttctacatctgtctcg

SEQ ID NO: 193 - DNA, 16 bp, Artificial Sequence
  Synthetic construct
tgacaactcatcggat

SEQ ID NO: 194 - DNA, 16 bp, Artificial Sequence
  Synthetic construct
gacacgctcaacacgt

SEQ ID NO: 195 - DNA, 16 bp, Artificial Sequence
  Synthetic construct
aatccagtcgtttatc

SEQ ID NO: 196 - DNA, 16 bp, Artificial Sequence
  Synthetic construct
gctgggttccttcaat

SEQ ID NO: 197 - DNA, 16 bp, Artificial Sequence
  Synthetic construct
aatcggtgttcccttg

SEQ ID NO: 198 - DNA, 16 bp, Artificial Sequence
  Synthetic construct
caaccaacatcacgat

SEQ ID NO: 199 - DNA, 16 bp, Artificial Sequence
  Synthetic construct
tcacgaacaccagtta

SEQ ID NO: 200 - DNA, 16 bp, Artificial Sequence
  Synthetic construct
tacttgtcaagcgatg

SEQ ID NO: 201 - DNA, 16 bp, Artificial Sequence
  Synthetic construct
cttctctcagacgctc

SEQ ID NO: 202 - DNA, 16 bp, Artificial Sequence
  Synthetic construct
ctcgaaagtctgattg

SEQ ID NO: 203 - DNA, 16 bp, Artificial Sequence
  Synthetic construct
acgccgatcgtatcag

SEQ ID NO: 204 - DNA, 16 bp, Artificial Sequence
  Synthetic construct
ctcgtacgtgagcgat

SEQ ID NO: 205 - DNA, 16 bp, Artificial Sequence
  Synthetic construct
tggccagaggagttgc

SEQ ID NO: 206 - DNA, 16 bp, Artificial Sequence
  Synthetic construct
ctgctgttcatcgctc

SEQ ID NO: 207 - DNA, 16 bp, Artificial Sequence
  Synthetic construct
tacagtgagcgccttg

SEQ ID NO: 208 - DNA, 16 bp, Artificial Sequence
  Synthetic construct
cgagaaggtcgagttt

SEQ ID NO: 209 - DNA, 16 bp, Artificial Sequence
  Synthetic construct
gtgcagcgtccatcct

SEQ ID NO: 210 - DNA, 16 bp, Artificial Sequence
  Synthetic construct
gggatgaagtgaattg

SEQ ID NO: 211 - DNA, 16 bp, Artificial Sequence
  Synthetic construct
gacgcgtcacctcgga

SEQ ID NO: 212 - DNA, 16 bp, Artificial Sequence
  Synthetic construct
ttggaaccacatttct

SEQ ID NO: 213 - DNA, 16 bp, Artificial Sequence
  Synthetic construct
gatcgcgagttcgcgc

SEQ ID NO: 214 - DNA, 16 bp, Artificial Sequence
  Synthetic construct
gtgcatatcgccctta

SEQ ID NO: 215 - DNA, 16 bp, Artificial Sequence
  Synthetic construct
ttcgaagtcggttcgg

SEQ ID NO: 216 - DNA, 16 bp, Artificial Sequence
  Synthetic construct
gtctcgtagtcacgcc

SEQ ID NO: 217 - DNA, 16 bp, Artificial Sequence
  Synthetic construct
agggtgagtcgtcttc

SEQ ID NO: 218 - DNA, 16 bp, Artificial Sequence
  Synthetic construct
tcagctctcaactctt

SEQ ID NO: 219 - DNA, 16 bp, Artificial Sequence
  Synthetic construct
ggtgcgtgttaagaca

SEQ ID NO: 220 - DNA, 16 bp, Artificial Sequence
  Synthetic construct
cttaggagttcaggcc

SEQ ID NO: 221 - DNA, 16 bp, Artificial Sequence
  Synthetic construct
cggctagagccactat

SEQ ID NO: 222 - DNA, 16 bp, Artificial Sequence
  Synthetic construct
cgacttccagtaagat

SEQ ID NO: 223 - DNA, 782 bp, Artificial Sequence
  Synthetic construct
gggagcatcatccaacacccacatcccttctctacagaggcctctgagaggaaagttcatcaccatggactggacctggagggtcttctgcctgctggctgttatcccaggtgttcagtccctggaactaaggcagtctgggcctcagcagaggaagccggggacgtcagtgagggtctcctgcaacgcagaagactatgactatatggattactacgttcactgggtgcggcaggccccgggacaggggcctgagtggatggggttaatcaaccctcggtttggggccatgactctcaattataaatttcgcgacagactcagtctgacaagggacatctccacgggaatgttttacatggacctgaatggcctgcggtctgaggacacggccatttactactgtgccagagatgcgggggagcgcggcctgagaggctacagtgttagtttttttgacaattggggccggggaaccctggtcaccgtctcttcagcctccaccaagggcccatcggtcttccccctggcgccctgctccaggagcacctccgagagcacagcggccctgggctgcctggtcaaggactacttccccgaaccggtgacggtgtcgtggaactcaggcgccctgaccagcggcgtgcacaccttcccggctgtcctacagtcctcaggactctattccctcagcagcgtggtgaccgtgccctccagcaacttcggcacccagacctacacctgcaacgtagatcacaagcccagcaacaccaaggtggaca

SEQ ID NO: 224 - DNA, 680 bp, Artificial Sequence
  Synthetic construct
ggggatcatccaacaaccacatcccttctctacagaagcctctgagaggaaagttcatcaccatggactggacctggagggtcttctgcttgctggctgtaaccccaggtcttgagtcccacgtggaactaaagcagtctgggcctcagcagcggaagccgggggcgtcagtgagggtctcctgcaacgcagaggactatgactatatggattattttattcactgggtgcggcaggccccgggactagggcctgagtggctgggtttaatcaaccctcggtttggggccatgactctcaattataagtttcgggacagactcagtctgaccagggacatctccacgggaatgttttacatggacctgagtggcctgcgatctgaggacacggccatttattattgtgccagagatgcgggggagcgcggcctgagaggctacagtgttggtttctttgacagttggggccggggaaccctggtcaccgtctcctcagcctccaccaagggcccatcggtcttccccctggcaccctcctccaagagcacctctgggggcacagcggccctgggctgcctggtcaaggactacttccccgaaccggtgacggtgtcgtggaactcaggcgccctgaccagcggcgtgcacaccttcccggctgtcctacagtcctcagga

SEQ ID NO: 225 - DNA, 833 bp, Artificial Sequence
  Synthetic construct
gggctctactgatgaaaaccagcccagccctgaccctgcagctctgggagaggagcccagcaccagaagtcggcggtgtttccattcggtgatcagcactgaacacagaggacccaccatggagtttgggctgacatgggttttcctcgttgctcttttaagaggtgcccagtgtgacgtgcagctggtggaatatgggggaggtgtggttcggccgggggggtccctgggactctcttgtgttgcctccaagttcaattttcgttcttatgacatgtattgggtacgccaggcccccggcaaggggctggagtgggtcgctctactttctcccgatggcgatagaaaaaaaattcttgattctgtgaggggccgattcgacgtcgtcagagacaactccaggaaaactttctatttgcaaatgaacaatgtcagaccggaagacacggctatgtatttttgtgtcaaagacacaggattttatggcgactactgggctggcacctttgatatctggggccaagggaaaatggtcattgtctcttcagcctccaccaagggcccatcggtcttccccctggcaccctcctccaagagcacctctgggggcacagcggccctgggctgcctggtcaaggactacttccccgaaccggtgacggtgtcgtggaactcaggcgccctgaccagcggcgtgcacaccttcccggctgtcctacagtcctcaggactctactccctcagcagcgtggtgaccgtgccctccagcagcttgggcacccagacctacatctgcaacgtgaatcacaagcccagcaacaccaaggtggaca

SEQ ID NO: 226 - DNA, 825 bp, Artificial Sequence
  Synthetic construct
ggggagctcggggagaagagtcccagccccggaactcccaggggtttccattcggtgatcaccactgaacacagaggactcaccatggaccttgggctgatctgggttttccttactgttattctgaaaggtgtcaagggtgaggtgcaattggtggagtcgggaggaaaagtggtcaagcctggagggtccttgagactctcatgtgcagcctctggcttcgtcttcagtgaattctacatgacatggcttcgtcaggctccaggaaaggggctagagtgggttgcctatatcagtggcgacggacggagcggccactacgcagactcagtgaggggccgattcaccatttcgcgggataacggccggaattcagtggatctccaaatgaattccctgaaagtcgacgacacggccgtctactattgtgcgagagcaggtttagactgtaataacgccgcctgttatggccgcggttcatacgtctacttctactatgcgaatatctggggcagagggaccgcggtcatcgtctcctcagcctccaccaagggcccatcggtcttccccctggcaccctcctccaagagcacctctgggggcacagcggccctgggctgcctggtcaaggactacttccccgaaccggtgacggtgtcgtggaactcaggcgccctgaccagcggcgtgcacaccttcccggctgtcctacagtcctcaggactctactccctcagcagcgtggtgaccgtgccctccagcagcttgggcacccagacctacatctgcaacgtgaatcacaagcccagcaacacaaggtggaca

SEQ ID NO: 227 - DNA, 672 bp, Artificial Sequence
  Synthetic construct
ggggagagctttctgagagtcgtggacctcctgcacaagaacatgaaacacctgtggttcttcctccttctggtggcaggtcccagatgggtcctgtcccaggtgcgactagtccagtggggcgccggactgctgcggccctcgcagaccctgtcgctcacgtgcgctgtctatggtgcctccataaatgattattcctgggcttctctccgccagtccccaggcaagggattgcagtggattggggaaatagatgatagcggaaatgtcaagtacaatccgtccctcgagagtcgagtcggcctctccatagacgcgtccaagaatcaattgtctgtgaagttgaactcggtgaccgccgcggacacggctacatattactgtgcgagacttaggtttgtgaaaattaatgggatgggtggcttttcgtgggaccaccactatttaatggacgtctgggacatagggaccacggtcgtcgtctcctcagcctccaccaagggcccatcggtcttccccctggcgccctgctccaggagcacctccgagagcacagcggccctgggctgcctggtcaaggactacttccccgaaccggtgacggtgtcgtggaactcaggcgccctgaccagcggcgtgcacaccttcccggctgtcctacagtcctcagga

SEQ ID NO: 228 - DNA, 952 bp, Artificial Sequence
  Synthetic construct
gaggcaggatttagggcttggactctcagcatcccacacttgtacagctgatgtggcatctgtgttttctttcttatcctagatcaagctttgagctgtgaaagaccccgcctcatgaatatgcaaattatctgaggtctcctgagataaatgtggatatgttggtgccctgagagcatcacataacaaccagattcctcctctaaagaagcccctgggagcacagctcatcaccatggactggacctggagattcctctttgtggtggcagcagctacaggtgtccactcccaggtccaattggtgcagtctgggactcaagtgaagagtcctgggtcctcagtgaaggtctcctgtaaggcttccggagtcaacgtcattaattatgttattaattgggtgcgacaggcccctggacatgggcctgagtggatgggaggactcattccaagatttaatgtattaaattatgcacaaacattcacgggcagactcgttgttaccacggacgaatctagcaacactgcctacatggagttgaataacctgggatctgacgacacggccgtctattattgcattagaagagagaaacattctgactttggtggactcctcctcccatttgactactggggccagggaactctagtcatcgtctcctcggcctccaccaagggcccatcggtcttccccctggcaccctcctccaagagcacctctgggggcacagcggccctgggctgcctggtcaaggactacttccccgaaccggtgacggtgtcgtggaactcaggcgccctgaccagcggcgtgcacaccttcccggctgtcctacagtcctcaggactctactccctcagcagcgtggtgaccgtgccctccagcagcttgggcacccagacctacatctgcaacgtgaatcacaagcccagcaacaccaaggtggac

SEQ ID NO: 229 - DNA, 758 bp, Artificial Sequence
  Synthetic construct
gatcacccaaaaaccacacccctccttgggagaatcccctagatcacagctcctcaccatggactggacctggaccatccttttcttggtggcagctgcaacaggtgcccgctgtcagttggtgcagtctggacctgaggtgaagaaacctggggcctcagtgaaggtctcctgcagcgtttctggctacgtcttcacgacattttttttgagttgggtgcgacatgcccctggacaaggccttgagtggatgggtaggatcagtccctatagtaacgatgcaaactacgcacagaagtttcagggtcgaatcagcatgaccacagactttgccacgagtacagccttcttggaactgaggagtctgcgggcagacgacacggccgtctacttctgtgcgagagacactctacgtgacaatagtgcaggttatgacttatggggccagggaaccctggtcaccgtctcctcagcctccaccaagggcccatcggtcttccccctggcaccctcctccaagagcacctctgggggcacagcggccctgggctgcctggtcaaggactacttccccgaaccggtgacggtgtcgtggaactcaggcgccctgaccagcggcgtgcacaccttcccggctgtcctacagtcctcaggactctactccctcagcagcgtggtgaccgtgccctccagcagcttgggcacccagacctacatctgcaacgtgaatcacaagcccagcaacaccaaggtggaca

SEQ ID NO: 230 - DNA, 667 bp, Artificial Sequence
  Synthetic construct
ggacaaccagattcctcctctaaagaagccccagggagcacagctcatcaccatggactggacctggaggttcctctttgtggtggcagcagctacaggtgtcccatctcagggccaactggtgcagtctggggctgaggtaaagaggccggggtcttccgttagggtctcctgtgaggctcctggaatcatctataagaattatgttatccactgggtgcgacaggcccctgggcttggccttgagtggatgggcggactcatcccaaaatttcgtcagtcaaactatgcacagaagtttaggggcagaatgagcatcaccacggacgaaagttcagcctacttggagttgaccagcctgaaacctgacgacacggccttatattattgtgtgaggagagagaaatattctgatgccagtggacttttcctgccttttgactactggggccagggaacccaggtcaccgtctcctcagcctccaccaagggcccatcggtcttccccctggcaccctcctccaagagcacctctgggggcacagcggccctgggctgcctggtcaaggactacttccccgaaccggtgacggtgtcgtggaactcaggcgccctgaccagcggcgtgcacaccttcccggctgtcctacagtcctcaggactctac

SEQ ID NO: 231 - DNA, 780 bp, Artificial Sequence
  Synthetic construct
gggcatcacataacaaccagattcctcctctaaagaagcccctgggagcacagctcaccaccatggactggacctggaggttcctctttgtggtggcagccgccacaggtgtccagtcccaggtccaactggtgcaatctgggactgaagtgaggaagcccgggtcctcagtgaaggtctcctgtaaggcttctggagtcactggcataaattacgttattcattgggtgcgacaggccccgagacttgggccggaatggatgggaggactcatttcacggtttggtgtttcaaattatgcagagaaatttcaggggagattcacagttacgacggacgagtcaacgaacactgcctacatggagttgagaagcctgagatctgacgacacggccgtctatttctgtgtgagaagggaaaagtattctgatccaagcggctctctcctcccatttgactactggggccagggaaccatggtcagcgtctccgcggcctccaccaagggcccatcggtcttccccctggcaccctcctccaagagcacctctgggggcacagcggccctgggctgcctggtcaaggactacttccccgaaccggtgacggtgtcgtggaactcaggcgccctgaccagcggcgtgcacaccttcccggctgtcctacagtcctcaggactctactccctcagcagcgtggtgaccgtgccctccagcagcttgggcacccagacctacatctgcaacgtgaatcacaagcccagcaacaccaaggtggaca

SEQ ID NO: 232 - DNA, 694 bp, Artificial Sequence
  Synthetic construct
tatctggggagggtcctgctcacatggaaaatactttctgagagtcctggacctccggtgcaagaacatgaaacacctgtggttcttcctcctgctggtggcagctcccagatgggtcctgtcacaggtgcaattgcaggagtcgggcccaggcctggtgaggccctcacagaccctgagcctcacatgcagtgtgtctggtggctccattaatatcgagggttattcttggaattggatccgccaacacccagggaagggcctagaatggcttggtttcattcataatagtggaatcacctcctacagtccgtccctcacgggtcgacttagtatctcaggcgacacgtctaagaatcaagtgtctctgagtctgacctctctttcggccgcggacacggccgtctattactgtgcgagagccgtcaacggctttcggtcgggaatttctggatactactacaacggtctggacgtctggggccaagggaccacggtcatcgtctcttcagcctccaccaagggcccatcggtcttccccctggcaccctcctccaagagcacctctgggggcacagcggccctgggctgcctggtcaaggactacttccccgaaccggtgacggtgtcgtggaactcaggcgccctgaccagcggcgtgcacaccttcccggctgtcctacagtcctcagga

SEQ ID NO: 233 - DNA, 722 bp, Artificial Sequence
  Synthetic construct
ggggatctctgggggacgagcccagcactggaagtcgccggtgtttccattcggtgctcaccactgaacacagaggactcaccatggagtttgggctgaactgggtctttctcgtcgctcttttaagaggagtcccttgccgggggcaaatggtgatgtcggggggaggcgtggtccagcctgggaggtccctgagactctcctgttcaacccctggattcaccctcgcacggtttgctatacactggttccgccaggctccaggcaagggactggagtggcttggagttgtatcgtttgatgacaagaaaaaaaaatatgcagactccgttaaggaccgattctccatctccaaagacaacacccagaacacagtgtttctacaaatgaaaagcctgaaaagtgacgacacggctgtctacttctgtgcgacaggtgatgacagtggctggtcctggtcactattttactctgaattttggggccgtggaaccctcgtcaccgtctcctccgcttccaccaagggcccatcggtcttccccctggcgccctgctccaggagcacctccgagagcacagcggccctgggctgcctggtcaaggactacttccccgaaccggtgacggtgtcgtggaactcaggcgccctgaccagcggcgtgcacaccttcccggctgtcctacagtcctcaggactctattccctcagcagcgtggtgacc

SEQ ID NO: 234 - DNA, 677 bp, Artificial Sequence
  Synthetic construct
gagcatcacataacaaccagattcctcctctaaagaagcccctgggagcacagctcaccaccatggactggacctggaggttcctctttgtggtggcagccgctacaggtgtccagtcccaggtccagttggtgcaatctgggactgaagtgaggaggcctgggtcctcagtgaaggtctcctgtaaggcttctggagtcacaggcatcaattctgtcatccattgggtgcgacaggcccctagacatgggccggagtggatgggaggactcattccaagatttggtgtttcaaattacgcaccgaaattccaaggcagattcacagttacgacggacgagtctacgaacacggcctacatggagttgagcagcctgagatctgacgacacggccgtctatttttgtgtgagaagggaaaagtactctgatccaagtggttatttcctcccatttgactactggggccagggaaccctggtcaccgtctcctcggcctccaccaagggcccatcggtcttccccctggcaccctcctccaagagcacctctgggggcacagcggccctgggctgcctggtcaaggactacttccccgaaccggtgacggtgtcgtggaactcaggcgccctgaccagcggcgtgcacaccttcccggctgtcctacagtcctcagga

SEQ ID NO: 235 - DNA, 797 bp, Artificial Sequence
  Synthetic construct
gggagctctgggagtggagccccagccttgggattcccaagtgtttgtattcagtgatcaggactgaacacacaggactcaccatggacttggggctgacctgtattttccttgttactatattagaaggtgtccagagtgaggcgcagttggaggagtctgggggaaagttggtccagccgggggggtccctgagactctcctgttcagcctctggattcagcctcgaggacaacgacatgcactgggtccgccaaggcgaagggcgaggtttggagtgggtctcatcaattggaagttctggtgacacatattacgcagattcaattaagggccgatttaccatctccagagacaatggcaggaactccgtatatcttcaaataaagaccctgaacgtcggggacacggctgtgtatttctgtataagaggtcctgaaagtggttggttctatcactactacttcggtttgggcgtctggggccgcgggaccacggtcaccgtctcctcagcttccaccaagggcccatcggtcttccccctggcgccctgctccaggagcacctccgagagcacagcggccctgggctgcctggtcaaggactacttccccgaaccggtgacggtgtcgtggaactcaggcgccctgaccagcggcgtgcacaccttcccggctgtcctacagtcctcaggactctattccctcagcagcgtggtgaccgtgccctccagcaacttcggcacccagacctacacctgcaacgtagatcacaagcccagcaacaccaaggtggac

SEQ ID NO: 236 - DNA, 798 bp, Artificial Sequence
  Synthetic construct
ggggatctctgggggacgagcccagcactggaagtcgccggtgtttccattcggtgctcgccactgaacacagaggactcaccatggagtttgggctgaactgggtctttctcgtcgctcttttaagaggagtcccttgtcgggggcaaatggtgatgtctgggggaggcgtggtccagcctgggaggtccctgagactctcctgttcaacccctggattcaccctcgcacggtttgctatacactggttccgccaggctccaggcaagggactggagtggcttggagttgtatcgtatgatgacaagaaaaaaaaatatgcagactccgttaaggaccgattctccatctccaaagacaacacccagaacacagtgtttctacacatgaaaagcctgaaaactgacgacacggctgtctacttctgtgcgacaggtgatggcagtggctggtcctggtcacttttttactctgagttctggggccatggaaccctcgtcaccgtctcctccgcttccaccaagggcccatcggtcttccccctggcgccctgctccaggagcacctctgggggcacagcggccctgggctgcctggtcaaggactacttccccgaaccggtgacggtgtcgtggaactcaggcgccctgaccagcggcgtgcacaccttcccggctgtcctacagtcctcaggactctattccctcagcagcgtggtgaccgtgccctccagcagcttgggcacccagacctacacctgcaacgtgaatcacaagcccagcaacaccaaggtggaca

SEQ ID NO: 237 - DNA, 771 bp, Artificial Sequence
  Synthetic construct
ggggagtagtttctgagagtcctggacctcctgtgcaagaacatgaaacatctgtggttcttcctcctcctggtggcagctcccagaagggtcctgtcccaggtgcggctagaggagtcgggcccaggactggtgaagccgtcgcagaccctgtcactcacctgcagtgtctcaggcggctcccttatgagtggttctttctactggacttggatccggcagtccgccgggaaggaattcgaatggattggccatgtctatctcagtgggacctccgactccaatccttctctcaagagtcgagtcactctttcagtggacacgtccgtcaaccagttctccctccaactgagttctgtgaccgccgcagacacgggcgtctactactgcgcgaggggtcattattatgatagtcgtggaaacttaagactcggggcgcgctggttcgactcctggggccagggaaccctggtcagcgtctcctcagcctccaccaagggcccatcggtcttccccctggcaccctcctccaagagcacctctgggggcacagcggccctgggctgcctggtcaaggactacttccccgaaccggtgacggtgtcgtggaactcaggcgccctgaccagcggcgtgcacaccttcccggctgtcctacagtcctcaggactctactccctcagcagcgtggtgaccgtgccctccagcagcttgggcacccagacctacatctgcaacgtgaatcacaagcccagcaacaccaaggtggac

SEQ ID NO: 238 - DNA, 772 bp, Artificial Sequence
  Synthetic construct
gggggagtctccctcactgcccagttgggatctcagggcttcactctctgtcccccaccatcatggggtcaaccgccaacctcgccctcctcctggctgttctgcaaggtgtctgtgccgaggtacacctggtgcagtctgaagcagaggtgaaaaagcccggggagtctctgaaaatctcctgcacgggttctggatacaattttgctgattactggattgtctgggtgcgccagatgcccgggagaggcctggagtggatgggcatcatctttccggacgactctgacacgacatatagcccggcctttcaaggccaagtcaccatttcagccgacaaggccacctccacagcctttttgcactggaacagtctgacggccgacgacagtgccctctattattgtgcgagactccaatcgggagatgagggtagttcggccctcgaacactggggccagggcaccctggtcatcgtctcgtcagcctccaccaagggcccatcggtcttccccctggcgccctgctccaggagcacctctgggggcacagcggccctgggctgcctggtcaaggactacttccccgaaccggtgacggtgtcgtggaactcaggcgccctgaccagcggcgtgcacaccttcccggctgtcctacagtcctcaggactctactccctcagcagcgtggtgaccgtgccctccagcagcttgggcacccagacctacacctgcaacgtgaatcacaagcccagcaacaccaaggtggacaa

SEQ ID NO: 239 - DNA, 742 bp, Artificial Sequence
  Synthetic construct
ggggagctctgagagaggagcccagccctgggattttcaggtgttttcatctggtgatcaggactgaacagagagaactcaccatggaatttgggctgagatggcttcttcttgtgactcttttaaaaggtgtccagtgtgaggtgcagttgttggaatctgggggaggcttggtacagccgggggggtctatgagactctcctgtgttgcctctggcttcaattttaaaggtttcgccatgaattgggtccgacaggctccagggaaggggctgcagtgggtcgcagcaattgttggcagtggcattgggacatattccgtgggcgttgtgaagggccgcttctccatctccagagacaattccaagaacaccctgtatctccaaatggacagcctgagagttgaggacacggcccaatatttctgtgtcaaagggggtggctacagtcccctccgtggggcacaattctttgactcctggggccagggcatcctggttaccgtctcctcagcctccaccaagggcccatcggtcttccccctggcgccctgctccaggagcacctccgagagcacagcggccctgggctgcctggtcaaggactacttccccgaaccggtgacggtgtcgtggaactcaggcgccctgaccagcggcgtgcacaccttcccggctgtcctacagtcctcaggactctactccctcagcagcgtggtgaccgtgaccgccagaaacttccc

SEQ ID NO: 240 - DNA, 776 bp, Artificial Sequence
  Synthetic construct
tatgggggagcatcacccagcaaccacatctgtcctctagggaatcccatgagagctccgttcctcaccatggactggacctggaggatcctcttcttggtggcggcagccacaggagcccactcccaggtgcaggtcctgcagtctgggcctgaaatgaagaagcccggggcctcagtgaaagtctcatgtaagacttctggacccatgttcagcggcttctatattcactgggtgcgacaggcccctggacagggacttgagtggatgggatggatcaacaccaacagtggttctacaagattcccaccgaaatttcaagacagagtcaccgtgaccagggacaaatccgtcagcacagtctacatggacctgaccagactgacatttgacgacacggccctatattattgtgtcagagggactccagtgtctggccgctactactttgatgtttggggccagggaaccctagtcaccgtctcctcagcctccaccaagggcccatcggtcttccccctggcgccctgctccaggagcacctccgagagcacagcggccctgggctgcctggtcaaggactacttccccgaaccggtgacggtgtcgtggaactcaggcgccctgaccagcggcgtgcacaccttcccggctgtcctacagtcctcaggactctactccctcagcagcgtggtgaccgtgccctccagcagcttgggcacccagacctacatctgcaacgtgaatcacaagcccagcaacaccaaggtggacaa

SEQ ID NO: 241 - DNA, 781 bp, Artificial Sequence
  Synthetic construct
ggggagcatcacataaccaccacattcctcctctgaagaagcccctgggagcacagctcgtcaccatggactggacctggaggttcctctttgtggtggcagcagctacaggtgtccagtcccagttacagctggtgcagtctggggctgaggtgaagaagcctgggtcctcagtgagggtctcctgcaaggcttatggagactccttcggcagccgaactatcaactgggtgcgacaggcccccggacaaggacttcagtggatgggcagggtcaaccctttttttggaacagcagactacgtagagacattgcaggacagactcctaattacattggacgcatcaatgagttcagcctacatggacctgagcggcctgacatcggacgacacggccgtctattattgtgcgacggagagggggatggttcaagtcggccatgggggcgggggcttttttgactactggggccagggagccctggtcaccgtctcctcagcctccaccaagggcccatcggtcttccccctggcaccctcctccaagagcacctctgggggcacagcggccctgggctgcctggtcaaggactacttccccgaaccggtgacggtgtcgtggaactcaggcgccctgaccagcggcgtgcacaccttcccggctgtcctacagtcctcaggactctactccctcagcagcgtggtgaccgtgccctccagcagcttgggcacccagacctacatctgcaacgtgaatcacaagcccagcaacaccaaggt

SEQ ID NO: 242 - DNA, 753 bp, Artificial Sequence
  Synthetic construct
gcattgggtgatcaggactgaacagagagaactcaccatggagtttgggctgaggtggctctttcttgtggcttttttaaaaggtgtccagtgtgaggtggagttgttggagtctgggggaggcctggtacagccgggggggtccctgagactctcatgtgcagcctctggattcacctttagtcgcttttccatgacttgggtccgccaggccccagggaagggcctacaatggatcgcaagtattgttgggagcggaattggctcctattccgtggactccgtgaagggccggttcacgatctacagagacaatcccaagaatatgttgtatttgcagatggacagcctgacagtcgaagacacggccatatatttctgtgtcaaaggaggcggctacaaccccctccacaatggtcttttctttgaccactggggccagggaaccctggtcactgcctcctcagcctccaccaagggcccatcggtcttccccctggcgccctgctccaggagcacctccgagagcacagcggccctgggctgcctggtcaaggactacttccccgaaccggtgacggtgtcgtggaactcaggcgccctgaccagcggcgtgcacaccttcccggctgtcctacagtcctcaggactctattccctcagcagcgtggtgaccgtgccctccagcaacttcggcacccagacctacacctgcaacgtagatcacaagcccagcaacaccaaggtggacaa

SEQ ID NO: 243 - DNA, 785 bp, Artificial Sequence
  Synthetic construct
gggagcatcacataaccaccacattcctcctccgaagaagcccctgggagcacagctcgtcaccatggactggacctggaggttcctctttgtggtggcagcagctacaggtgtccagtcccaggtccagctggtgcagtctggggctgaggtgaagaggcctgggtcctcagtgagggtctcctgcaaggcttctggaggctccttcggcagccgctcgatcaactggctgcgacaggcccccggacaaggacttcagtggatgggcagggtcaaccctttctttgattcagcagactacctacagacattgcagggcagactcctaattacattggacacatcaacggactcagcctacatggacttgagcggcctgaggtcggacgacacggccgtctattactgtgcgacggagagggggatggttcaactcggccatgggggcgggggcttctttgacttctggggccagggagccctggtcaccgtctcctcagcctccaccaagggcccatcggtcttccccctggcaccctcctccaagagcacctctgggggcacagcggccctgggctgcctggtcaaggactacttccccgaaccggtgacggtgtcgtggaactcaggcgccctgaccagcggcgtgcacaccttcccggctgtcctacagtcctcaggactctactccctcagcagcgtggtgaccgtgccctccagcagcttgggcacccagacctacatctgcaacgtgaatcacaagcccagcaacaccaaggtggaca

SEQ ID NO: 244 - DNA, 668 bp, Artificial Sequence
  Synthetic construct
ggggatactttctgagagtcctggacctcctgtggaagaacatgaaacatctgtggttcttcctcctcctggtggcggctcccaaatgggtcatgtctcaggtgcaactgcaggagtcgggcccagggctggtgaagccctcacagagcctgtccgtcacctgcactgtctctggtgcctccatcatgagtgggacttttcactggacctggatccgacagaccgccgagaagggactggagtggcttggccatatttatctcagtggaaccagcaattataacccctccctcgagagtcgactcaccatgtctgtcgacacctccaagaaccagtattacctgactttgaattctgtgaccgtcgcagacacgggcatttattattgtgtgaggggtcattactatgacagtcgtggaaatttacgatttggggcgcgctggttcgacccctggggacagggaatcctggtcagcgtctcctcagcctccaccaagggcccatcggtcttccccctggcaccctcctccaagagcacctctgggggcacagcggccctgggctgcctggtcaaggactacttccccgaaccggtgacggtgtcgtggaactcaggcgccctgaccagcggcgtgcacaccttcccggctgtcctacagtcctcagga

SEQ ID NO: 245 - DNA, 680 bp, Artificial Sequence
  Synthetic construct
ggggatcacataaccaccacattcctcctccgaagaagcccctgggagcacagctcgtcaccatggactggacctggaggttcctctttgtggtggcagcagctacaggtgtccagtcccaggtccagctggtgcagtctggggctgaggtgaagaggcctgggtcctcagtgagggtctcctgcaaggcttctggaggctccttcggcagccgctctatcaactggctgcgacaggcccccggacaaggacttcagtggatgggcagggtcaaccctttctttgattcagcagactacctacagacattgcagggcagactcctaattacattggacacatcaacggactcagcctacatggacttgagcggcctgagctcggacgacacggccgtctattactgtgcgacggagagggggatggttcaactcggccatgggggcgggggcttctttgacttctggggccagggagccctggtcaccgtctcctcagcctccaccaagggcccatcggtcttccccctggcaccctcctccaagagcacctctgggggcacagcggccctgggctgcctggtcaaggactacttccccgaaccggtgacggtgtcgtggaactcaggcgccctgaccagcggcgtgcacaccttcccggctgtcctacagtcctcagga

SEQ ID NO: 246 - DNA, 788 bp, Artificial Sequence
  Synthetic construct
gggggagcatcacataaccaccacattcctcctccgaagaagcccctgggagcacagctcgtcaccatggactggacctggaggttcctctttgtggtggcagcagctacaggtgtccagtcccaggtccagctggtgcagtctggggctgaggtgaagaggcctgggtcctcagtgagggtctcctgcaaggcttctggaggctccttcggcagccgctctatcaactggctgcgacaggcccccggacaaggacttcagtggatgggcagggtcaaccctttctttgattcagcagactacctacagacattgcagggcagactcctaattacattggacacatcaacggactcagcctacatggacttgagcggcctgagctcggacgacacggccgtctattactgtgcgacggagagggggatggttcaactcggccatgggggcgggggcttctttgacttctggggccagggagccctggtcaccgtctcctcagcctccaccaagggcccatcggtcttccccctggcaccctcctccaagagcacctctgggggcacagcggccctgggctgcctggtcaaggactacttccccgaaccggtgacggtgtcgtggaactcaggcgccctgaccagcggcgtgcacaccttcccggctgtcctacagtcctcaggactctactccctcagcagcgtggtgaccgtgccctccagcagcttgggcacccagacctacatctgcaacgtgaatcacaagcccagcaacaccaaggtggacaa

SEQ ID NO: 247 - DNA, 771 bp, Artificial Sequence
  Synthetic construct
gggggagtctccctcactgcccagttgggatctcagggcttcactctctgtcccccaccatcatggggtcaaccgccaacctcgccctcctcctggctgttctgcaaggtgtctgtgccgaggtacacctggtgcagtctgaagcagaggtgaaaaagcccggggagtctctgaaaatctcctgcacgggttctggatacaattttgttgattactggattgtctgggtgcgccagatgcccgggagaggcctggagtggatgggcatcatctttccggacgactctgacacgacatacagcccggcctttcaaggccaagtcaccatctcagccgacaaggccacctccaccgcctttttgcactggaacagtctgagggccgccgacagtgccctctattattgtgcgagactccaatcgggggatgagggtagttcggccctcgaacactggggccagggcaccctggtcatcgtctcgtcagcctccaccaagggcccatcggtcttccccctggcgccctgctccaggagcacctctgggggcacagcggccctgggctgcctggtcaaggactacttccccgaaccggtgacggtgtcgtggaactcaggcgccctgaccagcggcgtgcacaccttcccggctgtcctacagtcctcaggactctactccctcagcagcgtggtgaccgtgccctccagcagcttgggcacccagacctacacctgcaacgtgaatcacaagcccagcaacaccaaggtggaca

SEQ ID NO: 248 - DNA, 804 bp, Artificial Sequence
  Synthetic construct
gggagctctgggagacgagcccagcactggaagtcgccggtgtttccattcggtactcatcactgaacacagaggactcaccatggagtttgggctgagctgggtttttctcgttgctcttttaagaggtgtccagtgtcaactgcaggtggtggagtccggaggaggcgtggtccggcctgggaggtcgctgaggctctcctgtactgcctctgcctctggattcatcttcaatgtctttaacatgcactgggtccgccagacctcaggcaaggggttggattggatagcggtcatctcatatgatggaagaaagatccaatatgcagactccgtgaagggccgattcaccgtctccagagacaattccaaggacactctatatctgcaaatgaacagcctgaaaactgaggacacaggtctttatttctgcgcgacaggtgataaaactggctggtcagcgtcactggactactttcgcttcttgggccagggaaccctggtcaccgtctcctcagcttccaccaagggcccatcggtcttccccctggcaccctcctccaagagcacctctgggggcacagcggccctgggctgcctggtcaaggactacttccccgaaccggtgacggtgtcgtggaactcaggcgccctgaccagcggcgtgcacaccttcccggctgtcctacagtcctcaggactctactccctcagcagcgtggtgaccgtgccctccagcagcttgggcacccagacctacatctgcaacgtgaatcacaagcccagcaacaccaaggtggacaa

SEQ ID NO: 249 - DNA, 758 bp, Artificial Sequence
  Synthetic construct
ggagctctgggagacgagcccagcactggaagtcgccggtgtttccaatcggtgatcatcactgaacacagaggactcaccatggagtttgggctgaactgggttttcctcgttgcgcttttaagaggtgtccagtgtcagattcaactggtggagtctgggggaggcgtggtccagcctgggacatccctgcgactctcttgtaaagtgtctggattcagcttcgatgcctattcgattcactgggtccgtcaggctccaggcaaggggctgcagtgggtggctattatctcatatgatggaaacaagaataatctcgcaggctccgtgaagggccgattcaccatctccagagacaattatgagaatacagtgtatcttgaaatgaacaacgtgagacctgaagacacggctgtttatttctgtgcgagagatggcacctccaaatataagccggcattttttcttcatcgcgggtcgggctacatggacgtctggggcaaggggaccatggtcaccgtcacctcagcctccaccaagggcccatcggtcttccccctggcgccctgctccaggagcacctccgagagcacagcggccctgggctgcctggtcaaggactacttccccgaaccggtgacggtgtcgtggaactcaggcgccctgaccagcggcgtgcacaccttcccggctgtcctacagtcctcaggactctactccctcagcagcgtggtgaccgtgaccgccagaaacttccc

SEQ ID NO: 250 - DNA, 816 bp, Artificial Sequence
  Synthetic construct
ggggagctctgggagacgagcccagcactggaagtcgccggtgtttccaatcggtgatcatcactgaacacagaggactcaccatggagtttgggctgaactgggttttcctcgttgcgcttttaagaggtgtccagtgtcagattcaactggtggagtctgggggaggcgtggtccagcctgggacatccctgcgactctcttgtaaagtgtctggattcagcttcgatgcctattcgattcactgggtccgtcaggctccaggcaaggggctgcagtgggtggctattatctcatatgatggaaacaagaataatctcgcaggctccgtgaagggccgattcaccatctccagagacaattatgagaatacagtgtatcttgaaatgaacaacgtgagacctgaagacacggctgtttatttctgtgcgagagatggcacctccaaatataagccggcattttttcttcatcgcgggtcgggctacatggacgtctggggcaaggggaccatggtcaccgtcacctcagcctccaccaagggcccatcggtcttccccctggcaccctcctccaagagcacctctgggggcacagcggccctgggctgcctggtcaaggactacttccccgaaccggtgacggtgtcgtggaactcaggcgccctgaccagcggcgtgcacaccttcccggctgtcctacagtcctcaggactctactccctcagcagcgtggtgaccgtgccctccagcagcttgggcacccagacctacatctgcaacgtgaatcacaagcccagcaacaccaaggtggaca

SEQ ID NO: 251 - DNA, 701 bp, Artificial Sequence
  Synthetic construct
gggggagcatcacccagcaaccacatctgtcctctagggaatcccctgagagctccgttcctcaccatggactggacctggaggatcctcttcttggtggcggcagccacaggagcccactcccaggtgcaggtcctgcagtctgggcctgaaatgaagaagcccggggcctcagtgaaagtctcatgtaagacttctggacccaccttcatcggcttctatattcactgggtgcgacaggcccctggacagggacttgagtggatgggatggatcaacactaatagtggtgccacaaggttcccaccgaaatttcaagacagactcaccgtgaccagggacacatccgtcagcacagtctacatggacctgaccagactgacatttgacgacacggccctatattattgtgtcagagggactccagtgtctggccgctattactttgatatttggggccagggaaccctagtcaccgtctcctcagcctccaccaagggcccatcggtcttccccctggcaccctcctccaagagcacctctgggggcacagcggccctgggctgcctggtcaaggactacttccccgaaccggtgacggtgtcgtggaactcaggcgccctgaccagcggcgtgcacaccttcccggctgtcctacagtcctcaggactctactccctcagcagcgtggtgaccgtgcc

SEQ ID NO: 252 - DNA, 787 bp, Artificial Sequence
  Synthetic construct
ggggatcgcagaacaaccagattcctcctctaaagaagcccctgggagcactgctcatcaccatggactggacctggaggttcctctttgtggtggcagcagctacaggtgtccactctcaagtccaaatggtgcagtcgggggctgaggtgaagaagccggggtcatcggtgaaggtctcctgcaaggcttctggaggcagcttcgacaaccatgctgtcgcctgggttcgacaggcccctggtcaaggacttgagtggatgggaggaataatccctatctttgggacacctcactccgcacagaagttcaagggcagagtgacctttagcgcagacgaagtgacggacacagtctacatggaattgaccagcctgagattcgacgacacggccgtttattattgtgcgaaaaatcaggcggacacaacgaccattgaccttcacggcggtgatgcttatgacctctggggccaagggacgatggtcaccgtcaggtcagcctccaccaagggcccatcggtcttccccctggcaccctcctccaagagcacctctgggggcacagcggccctgggctgcctggtcaaggactacttccccgaaccggtgacggtgtcgtggaactcaggcgccctgaccagcggcgtgcacaccttcccggctgtcctacagtcctcaggactctactccctcagcagcgtggtgaccgtgccctccagcagcttgggcacccagacctacatctgcaacgtgaatcacaagcccagcaacaccaaggtggacaa

SEQ ID NO: 253 - DNA, 711 bp, Artificial Sequence
  Synthetic construct
ggggctctgggagacgagcccagcactggaagtcgccggtgtttccattcggtgatcatcactgaacacagaggactcaccatggagtttgggctgagctgtgttctcctcattactcttttaagaggtgtccagtgtcagattcaattgatggagtcggggggacgcgtggcccagcctggggggtccctgcgactctcctgtgaagcctctggattcaccttcagtgactatgcagtccactgggtccgccaggctccaggcaaggggctggaatgggtggcagttatatcacatgatggaaacaacaaattcatcggagactccgggacgggccgattcagcattgcccgagacaattccagggacacagtctttctgcaaatgagcaggctgagacttgaggacacgggcgtgtacttctgtgcgaaagatggcacctccaagtaccagccggcctattttgttcatcgcggatcggactatatggacgtctggggcaaagggaccacggtcatcgtctcctcagcctccaccaagggcccatcggtcttccccctggcaccctcctccaagagcacctctgggggcacagcggccctgggctgcctggtcaaggactacttccccgaaccggtgacggtgtcgtggaactcaggcgccctgaccagcggcgtgcacaccttcccggctgtcctacagtcctcagga

SEQ ID NO: 254 - DNA, 813 bp, Artificial Sequence
  Synthetic construct
ggagctctgggagacgagcccagcactggaagtcgccggtgtttccattcggtgatcatcactgaacacagaggactcaccatggagtttgggctgagctgtgttctcctcattactcttttaagaggtgtccagtgtcagattcaattgatggagtcggggggacgcgtggcccagcctggggggtccctgcgactctcctgtgaagcctctggattcaccttcagtgactatgcagtccactgggtccgccaggctccaggcaaggggctggaatgggtggcagttatatcacatgatggaaacaacaaattcatcggagactccgggacgggccgattcagcattgcccgagacaattccagggacacagtctttctgcaaatgagcaggctgagacttgaggacacgggcgtgtacttctgtgcgaaagatggcacctccaagtaccagccggcctattttgttcatcgcggatcggactatatggacgtctggggcaaagggaccacggtcatcgtctcctcagcctccaccaagggcccatcggtcttccccctggcaccctcctccaagagcacctctgggggcacagcggccctgggctgcctggtcaaggactacttccccgaaccggtgacggtgtcgtggaactcaggcgccctgaccagcggcgtgcacaccttcccggctgtcctacagtcctcaggactctactccctcagcagcgtggtgaccgtgccctccagcagcttgggcacccagacctacatctgcaacgtgaatcacaagcccagcaacaccaaggtggac

SEQ ID NO: 255 - DNA, 769 bp, Artificial Sequence
  Synthetic construct
ggggatcatccaacaaccacatcccttctctacagaagcctctgagaggaaagttcttcaccatggactggacctggagggtcttctgcttgctggctgtagtcccaggtgttcacgcccaggcgcagctggtgcagtctggggctgaggtgaagaagcctggggcctccgtgaaggtttcctgcaagccatctgggtaccccgtccccaacttctacctcaattgggttcgacaggcccctagacaaagtcttgagtggatgggaatgatgtcccctactgggaataatgcaaaatatgcacagaagttccagggtagagtcaccatgaccagagactcgtccacgggcacagtctacatggagatgaacagtctggaatatgacgacacggccgtctattactgtgcgagactctggggaaaagtgggaacttctggggttgacgactggggccagggaaccctggtcaccgtctcctcagcctccaccaagggcccatcggtcttccccctggcgccctgctccaggagcacctccgagagcacagcggccctgggctgcctggtcaaggactacttccccgaaccggtgacggtgtcgtggaactcaggcgccctgaccagcggcgtgcacaccttcccggctgtcctacagtcctcaggactctattccctcagcagcgtggtgaccgtgccctccagcaacttcggcacccagacctacacctgcaacgtagatcacaagcccagcaacaccaaggtggacaa

SEQ ID NO: 256 - DNA, 681 bp, Artificial Sequence
  Synthetic construct
ctcttattggccaccaatttcttatatgggggctttctgagagtcatggatctcatgtgcaagaaaatgaggcacctgtggttcttcctcctgctggtggcggctcccagatgggtcctgtcccagctgcagcttaaggagtcgggccctggactgattaagccttcggcgaccctgtccctcacctgcactgtctctggtggccccatcaccactagcagttattactgggactggatccgccagtcccccgggaagggactggactggcttggaagtatctctcacaccgggagtactcactacagcgcgtccgtcaagggtcgactcgccataactgtcgacacgtccaagaaccagttctccctgaaactgagttctgtaagtgccgcagatacgggtgtatattattgtgcgagacattttagacgttttctggactggcgaccttactactttgactactggggccagggagccctggtcaccgtctcctcagcctccaccaagggcccatcggtcttccccctggcgccctgctccaggagcacctctgggggcacagcggccctgggctgcctggtcaaggactacttccccgaaccggtgacggtgtcgtggaactcaggcgccctgaccagcggcgtgcacaccttcccggctgtcctacagtcctcagga

SEQ ID NO: 257 - DNA, 680 bp, Artificial Sequence
  Synthetic construct
ggggatcacataaccaccacattcctcctctgaagaagcccctgggagcacagctcgtcaccatggactggacctggaggttcctctttgtggtggcagcagttacaggtgtccagtcccaggtccagctggtgcagtctggggctgaggtgaggaagcctgggtcctcagtgaaggtctcctgcaaggctattggaggcacattcaccagtaaaagcatccactgggtgcgacaggcccctggacaaggacttgagtggatgggcaggatcacccctatctttggaacatcagactacgcacaggatttccagggccgactcactattgtagcggacgcatacccaaatgcagtctccatggaaatgagaagcctgagatctgacgacacggccgtgtattattgcgcgacagaaaggggaatggttcaaatcggccatgggggtgggggctattttgacctctggggccagggaaccctgctcaccgtctcctcagcctccaccaagggcccatcggtcttccccctggcaccctcctccaagagcacctctgggggcacagcggccctgggctgcctggtcaaggactacttccccgaaccggtgacggtgtcgtggaactcaggcgccctgaccagcggcgtgcacaccttcccggctgtcctacagtcctcagga

SEQ ID NO: 258 - DNA, 744 bp, Artificial Sequence
  Synthetic construct
gggagctctgggagacgagcccagcactggaagtcgccggtaattccattcggtgatcatcacggaacacagaggactcaccatggagttcgggctgagttgggttttcctcgttgctcttttaagaggtgtccagtgtcaaattcaactggtggagtctgggggaggcgtggtccagcctgggaggtccgtgagactctcctgtggagcctctggattcgccttcagccgctacgccatgcattgggtccgccaggctccaggcaaggggctgcaatggctgactagtatatcatctgatggaagtcttaaaaagtatatagagtctgtgaaggggcgattcagcatctccagagacaactccaagaatgcactggatttgcaaatggacagcctgagacctgaagatacggctgtttattattgtgtgagggaaagggtgtttccgcaacagacaatcttgggaagttggttcgacccctggggccagggaaccgtggtcgtcgtctcctccgcctccaccaagggcccatcggtcttccccctggcgccctgctccaggagcacctccgagagcacagcggccctgggctgcctggtcaaggactacttccccgaaccggtgacggtgtcgtggaactcaggcgccctgaccagcggcgtgcacaccttcccggctgtcctacagtcctcaggactctactccctcagcagcgtggtgaccgtgaccgccagaaacttccc

SEQ ID NO: 259 - DNA, 801 bp, Artificial Sequence
  Synthetic construct
gggggggagaggagcccagcactagaagtcggcggtgtttccattcggtgatcagcactgaacacagaagactcaccatggagtttgggctgacctgggttttcctcgttgctcttttaagaggtgttcagggtcaggtgagactggttcagtctggggggggcatgacccagtctgggagatccctccgactgtcctgtgcaggctctggattcaccttcagtggccatggcatgcactgggtccgccagactccaggcaggggactgcaatgggtggcagttatttcatatgatggaagtcatgcattctatgaagactccgtgaagggccggttcaccgtctccagagacaattccaataacatattgtctctgcaaatgaacaacctgcgacctgaggactcgggtatttattactgtgcgagagatggaacagatattttgagtcccggactgcgactagatttaaattttgactgttggggccagggaagtctggtcgccgtctcctcagcctccaccaagggcccatcggtcttccccctggcaccctcctccaagagcacctctgggggcacagcggccctgggctgcctggtcaaggactacttccccgaaccggtgacggtgtcgtggaactcaggcgccctgaccagcggcgtgcacaccttcccggctgtcctacagtcctcaggactctactccctcagcagcgtggtgaccgtgccctccagcagcttgggcacccagacctacatctgcaacgtgaatcacaagcccagcaacaccaaggtggaca

SEQ ID NO: 260 - DNA, 778 bp, Artificial Sequence
  Synthetic construct
gggagcatcacataacaaccagattcctcctctaaagaagcccctgggagcacagctcatcaccatggactggacctggaggttcctctttgtggtggcagcaactacaggtgtccagtcccaggtccagctggttcagtctggggctgaggtgaagaagcctgggtcctcggtgaaagtctcctgcaaggcttctggaggttccttccagtatggtctcagctgggtgcgacaggcccctgggcaagggcttgagtggatggcagccatcctccctatgactggcttgacaaattacccacacaagtttcagggcagactgacgcttaccgcggatcaatctacgaacacagcctacttggacctgcgcagcctgacatttgacgacacggccatctattactgtgcgaaatttgctggtcagaatccctatgacactagtgggtattactttgactcgtggggccagggaacgctggtcaccgtctcctcagcctccaccaagggcccatcggtcttccccctggcaccctcctccaagagcacctctgggggcacagcggccctgggctgcctggtcaaggactacttccccgaaccggtgacggtgtcgtggaactcaggcgccctgaccagcggcgtgcacaccttcccggctgtcctacagtcctcaggactctactccctcagcagcgtggtgaccgtgccctccagcagcttgggcacccagacctacatctgcaacgtgaatcacaagcccagcaacaccaaggtggac

SEQ ID NO: 261 - DNA, 710 bp, Artificial Sequence
  Synthetic construct
tagatgggggagctctgggagaggagcccagcactagaagtcggcggtgtttccactcggtgatcagcactgaatacagaagactcaccatggagtttgggctgacctgggttttcctcgttgctcttttaagaggtgtccagagtcaggtgcagctggttcagtctgggggaggcttggcccagtctgggaggtccctgagactggcctgtaaagcctctggattcaacttcggtggccatggcatgcactgggtccgccagactccaggcaagggactggaatgggtggcagttatatcatatgacggaagtaactcattctatgaagactccgtgaggggccgattcaccgtctccagagacaattccgcggacattttgtccctggaaatgaacaacctgcgacctgacgactcgggtatttattactgtgcgagagatggaacagatgtcatgagtcctggattgcgactagatttaaattttgacgtttggggccagggaacccgggtcgccgtcacctcagcctccaccaagggcccatcggtcttccccctggcaccctcctccaagagcacctctgggggcacagcggccctgggctgcctggtcaaggactacttccccgaaccggtgacggtgtcgtggaactcaggcgccctgaccagcggcgtgcacaccttcccggctgtcctacagtcctcagga

SEQ ID NO: 262 - DNA, 758 bp, Artificial Sequence
  Synthetic construct
gggaatgctttctgagagtcatggatctcatgtgcaagaaaatgaggcacctgtggttcttcctcctgctggtggcggctcccagatgggtcctgtcccagttgcagctgaaggagtcgggccctggactgattaagccttcggcgaccctgtccctcacctgcactgtctctggtggccccatcaccactagcagttattactgggactggatccgccagtcccccgggaagggactggactggcttggaagtatctctcacactgggagcactcactacagcgcgtccgtcaagggtcgactcgccatatttgtcgacacgtccaagaaccagttctccctgaaactgagttctgtaagtgccgcagatacggctgtatattattgtgcgagacattttagacgttttatggagtggcgaccttactactttgactactggggccagggagccctggtcaccgtctcctcagcctccaccaagggcccatcggtcttccccctggcgccctgctccaggagcacctctgggggcacagcggccctgggctgcctggtcaaggactacttccccgaaccggtgacggtgtcgtggaactcaggcgccctgaccagcggcgtgcacaccttcccggctgtcctacagtcctcaggactctactccctcagcagcgtggtgaccgtgccctccagcagcttgggcacccagacctacacctgcaacgtgaatcacaagcccagcaacaccaaggtggac

SEQ ID NO: 263 - DNA, 747 bp, Artificial Sequence
  Synthetic construct
tatctggggagctctgggagacgagcccagcactggaagtcgccggtgtttccattcggtgaccatcactgaacacagacgactcaccatggagtttgggctgagctgggttttcctcgttgctcttttaagaggtgtccagtgtcaggtgcacctggtgcagtctgggggaggcgtggtccggcctgggaggtccctgagactctcctgtgcgccctctaaattcaccttcaatatgtgtgctatgcactgggtccgccagtctccaggcaaggggctagagtggttggcagtcatctcatatgatgcaaaaaataaaagatatagagattccgtgaagggccggttcaccatctccagagacaactccaagaactccctgtatctggacatgagccgcctgacacttgaggacacgggtacttatttctgtgtgacgggcgactgcactggctggtcatggtcactgcactactttgacaactggggccagggatccctggtcaccgtctcctcagcttccaccaagggcccatcggtcttccccctggcgccctgctccaggagcacctccgagagcacagcggccctgggctgcctggtcaaggactacttccccgaaccggtgacggtgtcgtggaactcaggcgccctgaccagcggcgtgcacaccttcccggctgtcctacagtcctcaggactctactccctcagcagcgtggtgaccgtgaccgccagaaacttccc

SEQ ID NO: 264 - DNA, 690 bp, Artificial Sequence
  Synthetic construct
atctgggggagtctccctcactgcccagcggggatctcagggcttcattttctgtcccccaccctcatggggtcaaccgccatcctcgccctcctcctgggtgttctgcaaggagtctgtgccgaggtgcacctggtgcagtctggaacagagctgaaaaagcccggggagtctctgaaaatctcctgcacggcttctggatacaattttgttgattactggattgtctgggtgcgccagctgcccgggagaggcctggagtggatggggatcatctttcctgatgattttgacaccacatacagcccggccttccaaggccaggtcaccatctcagccgacaagtcctccaccaccgcctttttgcagtggaatagcctgagggcctcggacagtggcctctattactgtgcgagactccagtcgggggatgatggcggtggggccctcgagcactggggccagggcaccctggtcatcgtctcgtcagcctccaccaagggcccatcggtcttccccctggcaccctcctccaagagcacctctgggggcacagcggccctgggctgcctggtcaaggactacttccccgaaccggtgacggtgtcgtggaactcaggcgccctgaccagcggcgtgcacaccttcccggctgtcctacagtcctcaggactctactccctcagcagc

SEQ ID NO: 265 - DNA, 698 bp, Artificial Sequence
  Synthetic construct
ggggagctctgggagacgagcccagcactggaagtcgccggtatttccattcggtgatcatcactgaacacagaggacgcaccatggagtttgggctgagttggattttcctcgttgctcttttaagaggtgtccagtgtcaaattcaactggtggagtcggggggaggcgtggtccagcctgggacgtccctgagactgtcctgtgtagcctctggattcagttttagtcgctatggcatgcactgggtccgccaggctccaggcaaggggctgcaatggctgactaccatatcatctgatggaaataataaaaaatatagggagtccgtgaagggccgattcagcatctccagagacaactccaagaatgcactggatttgcaactggacagcctgagagttgaggacacggctgtatattattgtgcgagggaaaggttgtttccacaacagacaatattgggaagttggttcgacccctggggccagggaaccctggtcgtcgtctcctccgcctccaccaagggcccatcggtcttccccctggcaccctcctccaagagcacctctgggggcacagcggccctgggctgcctggtcaaggactacttccccgaaccggtgacggtgtcgtggaactcaggcgccctgaccagcggcgtgcacaccttcccggctgtcctacagtcctcagga

SEQ ID NO: 266 - DNA, 727 bp, Artificial Sequence
  Synthetic construct
cgtatctgggggagtctccctcactgcccagcggggatctcagggcttcattttctgtcccccaccctcatggggtcaaccgccatcctcgccctcctcctgggtgttctgcaaggagtctgtgccgaggtgcacctggtgcagtctggaacagagctgaaaaagcccggggagtctctgaaaatctcctgcacggcttctggatacaattttgttgattactggattgtctgggtgcgccagctgcccgggagaggcctggagtggatggggatcatctttcctgatgattttgacaccacatacagcccggccttccaaggccaggtcaccatctcagccgacaagtcctccaccaccgcctttttgcagtggaatagcctgagggcctcggacagtggcctctattactgtgcgagactccagtcgggggatgatggcggtggggccctcgagcactggggccagggcaccctggtcatcgtctcgtcagcctccaccaagggcccatcggtcttccccctggcgccctgctccaggagcacctccgagagcacagcggccctgggctgcctggtcaaggactacttccccgaaccggtgacggtgtcgtggaactcaggcgccctgaccagcggcgtgcacaccttcccggctgtcctacagtcctcaggactctactccctcagcagcgtggtgaccgtgccctccagcagcttgggcaccc

SEQ ID NO: 267 - DNA, 793 bp, Artificial Sequence
  Synthetic construct
ggggagcatcacataacaaccagattcctcctctaaagaagcccctgggagcacagctcatcaccatggactggacctggaggttcctctttgtggtggcagcagctacaggtgtccagtcccaggtccaactggtgcagtctggggctgaggtgaagaaacctgggtcctcagtgaaagtctcctgtaagactacaagaggcaccttcacgaattatgttattagttgggtgcgccaggcccctggacaaggccttgaattgatgggagggatcctccctatgttgtctacaacaaaatacgcgcagaagttccagggcagagtcacgatctccacggacgaatccacgactacagcctacatggaattgagaagtctgacatctgaagacaccgccgtatattactgtgcgaccgatgacgaaaatagttactattctagtagtgcttatccctgggatgcttttgatatttggggtccaggaacaatggtcaccgtctcttcagcctccaccaagggcccatcggtcttccccctggcgccctgctccaggagcacctctgggggcacagcggccctgggctgcctggtcaaggactacttccccgaaccggtgacggtgtcgtggaactcaggcgccctgaccagcggcgtgcacaccttcccggctgtcctacagtcctcaggactctactccctcagcagcgtgagctcaaaaccccacttggtgacacaactcacacatgcccacggtgcccagagcccaaatcttgtgacacacctcccccatgc

SEQ ID NO: 268 - DNA, 698 bp, Artificial Sequence
  Synthetic construct
ggggagctctgggagacgagcccagcactggaagtcgccggtatttccattcggtgatcatcactgaacacagaggacgcaccatggagtttgggctgagttggattttcctcgttgctcttttaagaggtgtccagtgtcaaattcaactggtggagtcggggggaggcgtggtccagcctgggacgtccctgagactgtcctgtgtagcctctggattcagttttagtcgctatggcatgcactgggtccgccaggctccaggcaaggggctgcaatggctgactagcatatcatctgatggaaataataaaaaatatagggagtccgtgaagggccgattcagcatctccagagacaactccaagaatgcactggatttgcaactggacagcctgagagttgaggacacggctgtatattattgtgcgagggaaaggttgtttccacaacagacaatattgggaagttggttcgacccctggggccagggaaccctggtcgtcgtctcctccgcctccaccaagggcccatcggtcttccccctggcaccctcctccaagagcacctctgggggcacagcggccctgggctgcctggtcaaggactacttccccgaaccggtgacggtgtcgtggaactcaggcgccctgaccagcggcgtgcacaccttcccggctgtcctacagtcctcagga

SEQ ID NO: 269 - DNA, 507 bp, Artificial Sequence
  Synthetic construct
gggagctctgggagacgagcccagcactggaagtcgccggtgtttccattcggtgctcatcactgaacacagaggactcagcatggagtttgggctgagctgggtctttctcgttgctcttttaagaggtgcccagtgtcaaatacaggtgtctgggggaagggtagtccagcctgggaggtccctgagactctcctgtgcagcccctggatccaccctcagaatgtatgctatacactgggtccgccaggctccaggcaagggactgcagtggctggcagttatatcatatgatggaaagaaaaaacaatatgtagactccgttaaggaccgattcaccatctccagagacacttccaaggacacagtgtatctgcaaatgaacagcctgagaactgacgacacggctgtgtatttttgtgcgacaggcgacggcagtggctggtcctggtcactatactactctgaattctggggccagggaaccctggtcaccgtctcctcagc

SEQ ID NO: 270 - DNA, 782 bp, Artificial Sequence
  Synthetic construct
gacccaaaaaccacacccctccttgggagaatcccctagatcacagctcctcaccatggactggacctggagcatccttttcttggtggcagcagcaacaggtgcccactcccaggttcacttggtgcagtctggagctgaggtgaagaagcctggggcctcagtgaaggtcgcctgcaagactgctggttatcgttttaccgactttggtatcacttggatgcgacaggcccctggaggaggacttgagtggatgggatggatcagcgcttacaatggtcagacacaacatgcgcggaagttccagggcagaatcacaatgaccactgacacagacacggccacagcctacctggaattgaggagcctgaggtctgacgacacggccgtctatttctgtgcgcgccgctatttttatgatactcctggtgacctcctgctcgagacttattattttgattactggggccagggaaccctggtcaccgtctcctcagcctccaccaagggcccatcggtcttccccctggcgccctgctccaggagcacctccgagagcacagcggccctgggctgcctggtcaaggactacttccccgaaccggtgacggtgtcgtggaactcaggcgccctgaccagcggcgtgcacaccttcccggctgtcctacagtcctcaggactctattccctcagcagcgtggtgaccgtgccctccagcaacttcggcacccagacctacacctgcaacgtagatcacaagcccagcaacaccaaggtggaca

SEQ ID NO: 271 - DNA, 800 bp, Artificial Sequence
  Synthetic construct
ggggatcacacaacagccacatccctcccctacagaagcccccagagcgcagcacctcaccatggactgcacctggaggatcctcttcttggtggcagcagctacaggcacccacgcccaggtccacctgaaacagtctggggctgaggtgaagaagcctggggcctcactgaaggtctcctgtaaggtttccggacacagcgtcactgaattgcccatccactgggtgcgacaggctcctggaaaagggcttgaatggatgagtggttctcatcctgaagagggtgaacccatctacgcacagaggttgctgggtcgagtcaccatgagcgaagactcctctacaaacacagcctacatgcaattgagaagcctgagattagaagacacggccctgtatttctgtgcaacttcagtcccccagcccctcaactattatactggtcctgattaccagaccatggggtatgctcttgatatctggggccaagggacactagtcaccgtctcttcagcctccaccaagggcccatcggtcttccccctggcaccctcctccaagagcacctctgggggcacagcggccctgggctgcctggtcaaggactacttccccgaaccggtgacggtgtcgtggaactcaggcgccctgaccagcggcgtgcacaccttcccggctgtcctacagtcctcaggactctactccctcagcagcgtggtgaccgtgccctccagcagcttgggcacccagacctacatctgcaacgtgaatcacaagcccagcaacaccaaggtggaca

SEQ ID NO: 272 - DNA, 869 bp, Artificial Sequence
  Synthetic construct
gccttctctgaggtaacaggctttgaggtaagagataatctgtctcatgaatttgcaaataaccttagatctactgaggtaaatttggatacatcggggccctgaacgcatcatccaacaaccacatcccttctctgcagaagcctctcagaggaaagttcttcaccatggactgggcctggagggtcttctgcttgctggctgtagctccaggtgctcactcccaagtgcagttggttcagtctggggctgaggtgaagaagcctggggcctcactgaaggtttcctgccaggcttctgggttcgccttcaacacctattatattcactggatacggcaggcccctggacaaggacttgagtggatgggaatagtcaaccctatcggttctagcgcaacttacgcacagaagttccagggcagagtcaccatgaccaaggacgcgtccacgggcacagcctacatggaggtctccagcctaacatcagaggacacggccctctattattgtgcgagaacgatgggaatagctcgttgggcttttgatatgtggggccagggaacaatgatcatcgtctcttcagcctccaccaagggcccatcggtcttccccctggcgccctgctccaggagcacctccgagagcacagcggccctgggctgcctggtcaaggactacttccccgaaccggtgacggtgtcgtggaactcaggcgccctgaccagcggcgtgcacaccttcccggctgtcctacagtcctcaggactctattccctcagcagcgtggtgaccgtgccctccagcaacttcggcacccagacctacacctgcaacgtagatcacaagcccagcaacaccaaggtggac

SEQ ID NO: 273 - DNA, 1040 bp, Artificial Sequence
  Synthetic construct
acactcatctctcagaccagctccttcagcacatctctttacctggaagaagaggactctgggcttggagaggggaggccccaagaagagaactgagttctcaaagggcacagccagcattctcctcccagggtgagctcaaaagactggcgcctctctcatcccttgtcactgctccgtacaaacgcaccacccccatgcaaatcctcacttaggcgcccacaggaagccaccacacatttccttaaattcaggtccaactcataagggaaatgctttctgagagtcatggatctcatgtgcaagaaaatgaagcacctgtggttcttcctcctgctggtggcggctcccagatgggtcctgtcccagttgcaactgcaggagtcgggccctggactggtgaagccttcggagaccctgtccctcacatgcactgtctcaggtggcactttcagtcacaccacttactactgggcctggctccgccagcccccgggaaagggactggagtggattgggagtatcttttatagtgggagcacctacgacaacccgtccctcaagagtcgcgtcactctgtcggttgacacgtcgaagaaccagttctccctgaggctgacccctgtgactaccgaagacacggcgatgtatttctgtgccagacaggagggcgattacgatttttggggtggtcgaggaaggaaacaatacttccaatactggggccagggcaccctggtcaccgtctcctcagcctccaccaagggcccatcggtcttccccctggcgccctgctccaggagcacctctgggggcacagcggccctgggctgcctggtcaaggactacttccccgaaccggtgacggtgtcgtggaactcaggcgccctgaccagcggcgtgcacaccttcccggctgtcctacagtcctcaggactctactccctcagcagcgtggtgaccgtgccctccagcagcttgggcacccagacctacacctgcaacgtgaatcacaagcccagcaacaccaaggtggacaa

SEQ ID NO: 274 - DNA, 770 bp, Artificial Sequence
  Synthetic construct
tgggggctttctgagagtcatggatctcatgtgcaagaaaatgaagcacctgtggttcttcctcctgctggtggcggctcccagatgggtcctgtcccagttgcaactgcaggagtcgggccctggactggtgaagccttcggagaccctgtccctcacatgcactgtctcaggtggcactttcagtcacaccacttactactgggcctggctccgccagcccccgggaaagggactggagtggattgggagtatcttttatagtgggagcacctacgacaacccgtccctcaagagtcgcgtcactctgtcggttgacacgtcgaagaaccagttctccctgaggctgacccctgtgactaccgaagacacggcgatgtatttctgtgccagacaggagggcgattacgatttttggggtggtcgaggaaggaaacaatacttccaatactggggccagggcaccctggtcaccgtctcctcagcctccaccaagggcccatcggtcttccccctggcgccctgctccaggagcacctctgggggcacagcggccctgggctgcctggtcaaggactacttccccgaaccggtgacggtgtcgtggaactcaggcgccctgaccagcggcgtgcacaccttcccggctgtcctacagtcctcaggactctactccctcagcagcgtggtgaccgtgccctccagcagcttgggcacccagacctacacctgcaacgtgaatcacaagcccagcaacaccaaggtggaca

SEQ ID NO: 275 - DNA, 787 bp, Artificial Sequence
  Synthetic construct
ttacgttctttcttatatggggctttctgagagtcatggatctcatgtgcaagaaaatgaagcacctgtggttcttcctcctgctggtggcggctcccagatgggtcctgtcccagttgcaactgcaggagtcgggccctggactggtgaagccttcggagaccctgtccctcacatgcactgtctcaggtggcactttcagtcacaccacttactactgggcctggctccgccagcccccgggaaagggactggagtggattgggagtatcttttatagtgggagcacctacgacaacccgtccctcaagagtcgcgtcactctgtcggttgacacgtcgaagaaccagttctccctgaggctgacccctgtgactaccgaagacacggcgatgtatttctgtgccagacaggagggcgattacgatttttggggtggtcgaggaaggaaacaatacttccaatactggggccagggcaccctggtcaccgtctcctcagcctccaccaagggcccatcggtcttccccctggcgccctgctccaggagcacctctgggggcacagcggccctgggctgcctggtcaaggactacttccccgaaccggtgacggtgtcgtggaactcaggcgccctgaccagcggcgtgcacaccttcccggctgtcctacagtcctcaggactctactccctcagcagcgtggtgaccgtgccctccagcagcttgggcacccagacctacacctgcaacgtgaatcacaagcccagcaacaccaaggtggacaa

SEQ ID NO: 276 - DNA, 672 bp, Artificial Sequence
  Synthetic construct
tagctggggatgctttctgagagtcatggatctcatgcgcaagaagatgaaacacctgtggttcttcctcttgctggtggcggctcccagatgggtcctgtcccaactgcaactacaggagtcgggcccagggctggtgaagccttcggggaccctgtccctcacttgcactgtctctggtgcctccatcagcagttccaagtacttctggggctggatccgccagccccctgggaaggcactagaatggattgccatgatcttttatagtgggagcacctattacagtccctccttcgagagtcgagtcaccatctccgtcgacacgtcgaagaaccagttctccctgcagctgacttctgtgaccgccgctgacacggctgtttatttctgtgcgagacacaagcattacgatttctggagtcggggagggggttactactttgacttttgggggcagggagccctggtcaccgtctcctcagcctccaccaagggcccatcggtcttccccctggcaccctcctccaagagcacctctgggggcacagcggccctgggctgcctggtcaaggactacttccccgaaccggtgacggtgtcgtggaactcaggcgccctgaccagcggcgtgcacaccttcccggctgtcctacagtcctcaggactcta

SEQ ID NO: 277 - DNA, 770 bp, Artificial Sequence
  Synthetic construct
gggggctttctgagagtcatggatctcatgtgcaagaaaatgaagcacctgtggttcttcctcctgctggtggcggctcccagatgggtcctgtcccagttgcaactgcaggagtcgggccctggactggtgaagccttcggagaccctgtccctcacatgcactgtctcaggtggcactttcagtcacaccacttactactgggcctggctccgccagcccccgggaaagggactggagtggattgggagtatcttttatagtgggagcacctacgacaacccgtccctcaagagtcgcgtcactctgtcggttgacacgtcgaagaaccagttctccctgaggctgacccctgtgactaccgaagacacggcgatgtatttctgtgccagacaggagggcgattacgatttttggggtggtcgaggaaggaaacaatacttccaatactggggccagggcaccctggtcaccgtctcctcagcctccaccaagggcccatcggtcttccccctggcgccctgctccaggagcacctctgggggcacagcggccctgggctgcctggtcaaggactacttccccgaaccggtgacggtgtcgtggaactcaggcgccctgaccagcggcgtgcacaccttcccggctgtcctacagtcctcaggactctactccctcagcagcgtggtgaccgtgccctccagcagcttgggcacccagacctacacctgcaacgtgaatcacaagcccagcaacaccaaggtggacaa

SEQ ID NO: 278 - DNA, 783 bp, Artificial Sequence
  Synthetic construct
agatggggcaggttccagctcacatgggaaatactttcggagagtcctggacctcctgtgcaagaacatgaaacatctgtggttcttccttctgctggtggcagctcccagatgggtcctgtcccaggtggagctgcaggagtcgggcccaggaacggtgaagccttcggagaccctgtccctcacctgcactgtgtctggtggctccatgatcacttactactggagttggattcggcagcccccagggaagggactggaatggattgggtacatctattatactgggaagtccagttataacccctccctcaggagtcgattctccatgtcactagacacgtccaggaaccttttctcccttaaattaaattctgcgaccgcagcggacacggccgtctattactgtgcgagaggctttcgaccttcacctttcagtgaccacccatattattttgactactggggccggggaaccctgctctccgtctcctcaccctccaccaagggcccatcggtcttccccctggcgccctgctccaggagcacctccgagagcacagcggccctgggctgcctggtcaaggactacttccccgaaccggtgacggtgtcgtggaactcaggcgccctgaccagcggcgtgcacaccttcccggctgtcctacagtcctcaggactctactccctcagcagcgtggtgaccgtgccctccagcagcttgggcacccagacctacatctgcaacgtgaatcacaagcccagcaacaccaaggtggacaa

SEQ ID NO: 279 - DNA, 708 bp, Artificial Sequence
  Synthetic construct
gggacatgggaaatactttcggagagtcctggacctcctgtgcaagaacatgaaacatctgtggttcttccttctgctggtggcagctcccagatgggtcctgtcccaggtggagctgcaggagtcgggcccaggaacggtgaagccttcggagaccctgtccctcacctgcactgtgtctggtggctccatgatcacttactactggagttggattcggcagcccccagggaagggactggaatggattgggtacatctattatactgggaagtccagttataacccctccctcaggagtcgattctccatgtcactagacacgtccaggaaccttttctcccttaaattaaattctgcgaccgcagcggacacggccgtctattactgtgcgagaggctttcgaccttcacctttcagtgaccacccatattattttgactactggggccggggaaccctgctctccgtctcctcaccctccaccaagggcccatcggtcttccccctggcgccctgctccaggagcacctccgagagcacagcggccctgggctgcctggtcaaggactacttccccgaaccggtgacggtgtcgtggaactcaggcgccctgaccagcggcgtgcacaccttcccggctgtcctacagtcctcaggactctactccctcagcagcgtggtgaccgtgaccgccagaaacttccc

SEQ ID NO: 280 - DNA, 684 bp, Artificial Sequence
  Synthetic construct
ggggatatactttcggagagtcctggacctcctgtgcaagaacatgaaacatctgtggttcttccttctgctggtggcagctcccagatgggtcctgtcccaggtggagctgcaggagtcgggcccaggaacggtgaagccttcggagaccctgtccctcacctgcactgtgtctggtggctccatgatcacttactactggagttggattcggcagcccccagggaagggactggaatggattgggtacatctattatactgggaagtccagttataacccctccctcaggagtcgattctccatgtcactagacacgtccaggaaccttttctcccttaaattaaattctgcgaccgcagcggacacggccgtctattactgtgcgagaggctttcgaccttcacctttcagtgaccacccatattattttgactactggggccggggaaccctgctctccgtctcctcaccctccaccaagggcccatcggtcttccccctggcaccctcctccaagagcacctctgggggcacagcggccctgggctgcctggtcaaggactacttccccgaaccggtgacggtgtcgtggaactcaggcgccctgaccagcggcgtgcacaccttcccggctgtcctacagtcctcaggactctattccctcagcagcgtggtgaccgt

SEQ ID NO: 281 - DNA, 673 bp, Artificial Sequence
  Synthetic construct
gggaggttccagctcacatgggaaatactttcggagagtcctggacctcctgtgcaagaacatgaaacatctgtggttcttccttctgctggtggcagctcccagatgggtcctgtcccaggtggagctgcaggagtcgggcccaggaacggtgaagccttcggagaccctgtccctcacctgcactgtgtctggtggctccatgatcacttactactggagttggattcggcagcccccagggaagggactggaatggattgggtacatctattatactgggaagtccagttataacccctccctcaggagtcgattctccatgtcactagacacgtccaggaaccttttctcccttaaattaaattctgcgaccgcagcggacacggccgtctattactgtgcgagaggctttcgaccttcacctttcagtgaccacccatattattttgactactggggccggggaaccctgctctccgtctcctcaccctccaccaagggcccatcggtcttccccctggcgccctgctccaggagcacctccgagagcacagcggccctgggctgcctggtcaaggactacttccccgaaccggtgacggtgtcgtggaactcaggcgccctgaccagcggcgtgcacaccttcccggctgtcctacagtcctcagga

SEQ ID NO: 282 - DNA, 699 bp, Artificial Sequence
  Synthetic construct
gggatactttcggagagtcctggacctcctgtgcaagaacatgaaacatctgtggttcttccttctgctggtggcagctcccagatgggtcctgtcccaggtggagctgcaggagtcgggcccaggaacggtgaagccttcggagaccctgtccctcacctgcactgtgtctggtggctccatgatcacttactactggagttggattcggcagcccccagggaagggactggaatggattgggtacatctattatactgggaagtccagttataacccctccctcaggagtcgattctccatgtcactagacacgtccaggaaccttttctcccttaaattaaattctgcgaccgcagcggacacggccgtctattactgtgcgagaggctttcgaccttcacctttcagtgaccacccatattattttgactactggggccggggaaccctgctctccgtctcctcaccctccaccaagggcccatcggtcttccccctggcgccctgctccaggagcacctccgagagcacagcggccctgggctgcctggtcaaggactacttccccgaaccggtgacggtgtcgtggaactcaggcgccctgaccagcggcgtgcacaccttcccggctgtcctacagtcctcaggactctactccctcagcagcgtggtgaccgtgaccgccagaaacttccc

SEQ ID NO: 283 - DNA, 660 bp, Artificial Sequence
  Synthetic construct
ggggatgggaaatactttcggagagtcctggacctcctgtgcaagaacatgaaacatctgtggttcttccttctgctggtggcagctcccagatgggtcctgtcccaggtggagctgcaggagtcgggcccaggaacggtgaagccttcggagaccctgtccctcacctgcactgtgtctggtggctccatgatcacttactactggagttggattcggcagcccccagggaagggactggaatggattgggtacatctattatactgggaagtccagttataacccctccctcaggagtcgattctccatgtcactagacacgtccaggaaccttttctcccttaaattaaattctgcgaccgcagcggacacggccgtctattactgtgcgagaggctttcgaccttcacctttcagtgaccacccatattattttgactactggggccggggaaccctgctctccgtctcctcaccctccaccaagggcccatcggtcttccccctggcaccctcctccaagagcacctctgggggcacagcggccctgggctgcctggtcaaggactacttccccgaaccggtgacggtgtcgtggaactcaggcgccctgaccagcggcgtgcacaccttcccggctgtcctacagtcctcagga

SEQ ID NO: 284 - DNA, 789 bp, Artificial Sequence
  Synthetic construct
gggggagcatcacataacaaccagattcctcctctaaagaagcccctgggagcacagctcatcaccatggactggacctggaggttcctctgtgtggtggcagcagctacaggtgtccagtcccaggtccacctggtgcagtctggggctgaagtgaagaagcctgggtcctcggtgaaggtctcctgcaaggcttctggaggcaccttcagtagttattccgtcagctgggtgcgacaggcccctggacacggccttgaatggatgggagggatcatccctatgttcgggacacctagcaacgcccacaggttccgggacagagtcacatttaccgcggacgactccgcggaaacagtctatatggaactgcgcagcctcacatatgacgacacggccgtgtattactgtgcgagaaatcaggcggatacaactgtggtcgtgtctgatggcggtgatggctttgacatctggggccaagggacaacggtcaccgtctcttcaccctccaccaagggcccatcggtcttccccctggcaccctcctccaagagcacctctgggggcacagcggccctgggctgcctggtcaaggactacttccccgaaccggtgacggtgtcgtggaactcaggcgccctgaccagcggcgtgcacaccttcccggctgtcctacagtcctcaggactctactccctcagcagcgtggtgaccgtgccctccagcagcttgggcacccagacctacatctgcaacgtgaatcacaagcccagcaacaccaaggtggac

SEQ ID NO: 285 - DNA, 700 bp, Artificial Sequence
  Synthetic construct
ctgggagcatcacataacaaccagattcctcctctaaagaagcccctgggagcacagctcatcaccatggactggacctggaggttcctctttgtggtggcagcagctacaggtgtccagtcccaggtccagttggtgcagtctggggctgaagtgaagaggcctgggtccccggtgaagatctcctgcaagggttctggagacagcttcaccaattatgctatcacctgggtgcgacaggcccctggacaagggcttgagtgggttggagggatcgtccctgcatttgggattacaaaatacgcccggaagttccagggcagagtcaccatttccgcggacgagtccaccaataccgcctacatggaactcagcagcctgagatctgaggacacgggcgtgttttattgtgcgagactttacgcctattccggttttgacttctggggccagggaaccctggtcaccgtctccgcagcctccaccaagggcccatcggtcttccccctggcgccctgctccaggagcacctccgagaacacagcggccctgggctgcctggtcaaggactacttccccgaaccggtgacggtgtcgtggaactcaggcgccctgaccagcggcgtgcacaccttcccggctgtcctacagtcctcaggactctattccctcagcagcgtggtgaccgtgccctccagca

SEQ ID NO: 286 - DNA, 691 bp, Artificial Sequence
  Synthetic construct
gggggagcatcacataacaaccagattcctcctctaaagaagcccctgggagcacagctcatcaccatggactggacctggaggttcctctgtgtggtggcagcagctacaggtgtccagtcccaggtccacctggtgcagtctggggctgaagtgaagaagcctgggtcctcggtgaaggtctcctgcaaggcttctggaggcaccttcagtagttattccgtcagctgggtgcgacaggcccctggacacggccttgaatggatgggagggatcatccctatgttcgggacacctagcaacgcccacaggttccgggacagagtcacatttaccgcggacgactccgcggaaacagtctatatggaactgcgcagcctcacatatgacgacacggccgtgtattactgtgcgagaaatcaggcggatacaactgtggtcgtgtctgatggcggtgatggctttgacatctggggccaagggacaacggtcaccgtctcttcaccctccaccaagggcccatcggtcttccccctggcaccctcctccaagagcacctctgggggcacagcggccctgggctgcctggtcaaggactacttccccgaaccggtgacggtgtcgtggaactcaggcgccctgaccagcggcgtgcacaccttcccggctgtcctacagtcctcaggactct

SEQ ID NO: 287 - DNA, 658 bp, Artificial Sequence
  Synthetic construct
gggggcatcacataacaaccagattcctcctctaaagaagcccctgggagcacagctcatcaccatggactggacctggaggttcctctttgtggtggcagcagctacaggtgtccagtcccaggtccagttggtgcagtctggggctgaagtgaagaggcctgggtccccggtgaagatctcctgcaagggttctggagacagcttcaccaattatgctatcacctgggtgcgacaggcccctggacaagggcttgagtgggttggagggatcgtccctgcatttgggattacaaaatacgcccggaagttccagggcagagtcaccatttccgcggacgagtccaccaataccgcctacatggaactcagcagcctgagatctgaggacacgggcgtgttttattgtgcgagactttacgcctattccggttttgacttctggggccagggaaccctggtcaccgtctccgcagcctccaccaagggcccatcggtcttccccctggcaccctcctccaagagcacctctgggggcacagcggccctgggctgcctggtcaaggactacttccccgaaccggtgacggtgtcgtggaactcaggcgccctgaccagcggcgtgcacaccttcccggctgtcctacagtcctcagga

SEQ ID NO: 288 - DNA, 786 bp, Artificial Sequence
  Synthetic construct
ggggatcacataacaaccagattcctcctctaaagaagcccctgggagcacagctcatcaccatggactggacctggaggttcctctgtgtggtggcagcagctacaggtgtccagtcccaggtccacctggtgcagtctggggctgaagtgaagaagcctgggtcctcggtgaaggtctcctgcaaggcttctggaggcaccttcagtagttattccgtcagctgggtgcgacaggcccctggacacggccttgaatggatgggagggatcatccctatgttcgggacacctagcaacgcccacaggttccgggacagagtcacatttaccgcggacgactccgcggaaacagtctatatggaactgcgcagcctcacatatgacgacacggccgtgtattactgtgcgagaaatcaggcggatacaactgtggtcgtgtctgatggcggtgatggctttgacatctggggccaagggacaacggtcaccgtctcttcaccctccaccaagggcccatcggtcttccccctggcaccctcctccaagagcacctctgggggcacagcggccctgggctgcctggtcaaggactacttccccgaaccggtgacggtgtcgtggaactcaggcgccctgaccagcggcgtgcacaccttcccggctgtcctacagtcctcaggactctactccctcagcagcgtggtgaccgtgccctccagcagcttgggcacccagacctacatctgcaacgtgaatcacaagcccagcaacaccaaggtggaca

SEQ ID NO: 289 - DNA, 656 bp, Artificial Sequence
  Synthetic construct
gggggcatcacataacaaccagattcctcctctaaagaagcccctgggagcacagctcatcaccatggactggacctggaggttcctctttgtggtggcagcagctacaggtgtccagtcccaggtccagttggtgcagtctggggctgaagtgaagaggcctgggtccccggtgaagatctcctgcaagggttctggagacagcttcaccaattatgctatcacctgggtgcgacaggcccctggacaagggcttgagtgggttggagggatcgtccctgcatttgggattacaaaatacgcccggaagttccagggcagagtcaccatttccgcggacgagtccaccaataccgcctacatggaactcagcagcctgagatctgaggacacgggcgtgttttattgtgcgagactttacgcctattccggttttgacttctggggccagggaaccctggtcaccgtctccgcagcctccaccaagggcccatcggtcttccccctggcaccctcctccaagagcacctctgggggcacagcggccctgggctgcctggtcaaggactacttccccgaaccggtgacggtgtcgtggaactcaggcgccctgaccagcggcgtgcacaccttcccggctgtcctacagtcctcag

SEQ ID NO: 290 - DNA, 815 bp, Artificial Sequence
  Synthetic construct
ggggagctctgggagacgagcccagcactggaagtcgccggtgtttccattcggtgatcatcactgaacacagaggactcaccatggagtttgggctgagctgggttttcctcgttgctcttttaagaggtgtccagtgtcaggtgcaattggtggagtctgggggaggcgtggtccagcctgggaggtccctgacactctcttgtagaggctctggattcgatttcaatgcccacgctattcactgggtccgccaggctccaggcaaggggctgcaatgggtgactattatttcatttgatggagacaaaaagaacttcgcagagtccgtgaggggccgtttcaccatctccagagacaattccaagaacacagtgtatctgcaaatgaacagcctgagacctgaggacacggctgtatatttctgtgcgagagatgccacttccaagtaccatccggcatattttcttcatcgcggatccgcctacatggacgtctggggcaaagggaccacggtcatcgtttcctcagcctccaccaagggcccatcggtcttccccctggcgccctgctccaggagcacctccgagagcacagcggccctgggctgcctggtcaaggactacttccccgaaccggtgacggtgtcgtggaactcaggcgccctgaccagcggcgtgcacaccttcccggctgtcctacagtcctcaggactctattccctcagcagcgtggtgaccgtgccctccagcaacttcggcacccagacctacacctgcaacgtagatcacaagcccagcaacaccaaggtggac

SEQ ID NO: 291 - DNA, 657 bp, Artificial Sequence
  Synthetic construct
ggagcatcacataacaaccagattcctcctctaaagaagcccctgggagcacagctcatcaccatggactggacctggaggttcctctttgtggtggcagcagctacaggtgtccagtcccaggtccagttggtgcagtctggggctgaagtgaagaggcctgggtccccggtgaagatctcctgcaagggttctggagacagcttcaccaattatgctatcacctgggtgcgacaggcccctggacaagggcttgagtgggttggagggatcgtccctgcatttgggattacaaaatacgcccggaagttccagggcagagtcaccatttccgcggacgagtccaccaataccgcctacatggaactcagcagcctgagatctgaggacacgggcgtgttttattgtgcgagactttacgcctattccggttttgacttctggggccagggaaccctggtcaccgtctccgcagcctccaccaagggcccatcggtcttccccctggcaccctcctccaagagcacctctgggggcacagcggccctgggctgcctggtcaaggactacttccccgaaccggtgacggtgtcgtggaactcaggcgccctgaccagcggcgtgcacaccttcccggctgtcctacagtcctcagga

SEQ ID NO: 292 - DNA, 683 bp, Artificial Sequence
  Synthetic construct
gggggatgctctctgagagtcatggatctcatgtgcaagaaaatgaagcacctgtggttcttcctcctgctggtggcggctcccaaatgtgccctgtcccagttgcaactacaggagtcgggcccaggactggtgaagccttcggagaccctgtccctcacctgcactgtctctggtggctccatcagtgctactaattactactgggcctggatccgccagtccccaggaaagggtctggactggatcgccatgattttttatagtgggagcacttattacaatccgtccctcagcagtcgagtcaccatttccgtggacacgtcgaagaatcagttctccctgaggctgacgtctgtgaccgccgctgacacggccatttatttttgtgcgaggcacaaacattatgatttttggaatggaggagggggctactactttgactcctggggccggggaaccctggtcaccgtctcctcagcctccaccaagggcccatcggtcttccccctggcaccctcctccaagagcacctctgggggcacagcggccctgggctgcctggtcaaggactacttccccgaaccggtgacggtgtcgtggaactcaggcgccctgaccagcggcgtgcacaccttcccggctgtcctacagtcctcaggactctactccctcagcagcgt

SEQ ID NO: 293 - DNA, 682 bp, Artificial Sequence
  Synthetic construct
gggaggtccaactcataagggaaatgctctctgagagtcatggatctcatgtgcaagaaaatgaagcacctgtggttcttcctcctgctggtggcggctcccaaatgtgccctgtcccagttgcaactacaggagtcgggcccaggactggtgaagccttcggagaccctgtccctcacctgcactgtctctggtggctccatcagtgctactaattactactgggcctggatccgccagtccccaggaaagggtctggactggatcgccatgattttttatagtgggagcacttattacaatccgtccctcagcagtcgagtcaccatttccgtggacacgtcgaagaatcagttctccctgaggctgacgtctgtgaccgccgctgacacggccatttatttttgtgcgaggcacaaacattatgatttttggaatggaggagggggctactactttgactcctggggccggggaaccctggtcaccgtctcctcagcctccaccaagggcccatcggtcttccccctggcaccctcctccaagagcacctctgggggcacagcggccctgggctgcctggtcaaggactacttccccgaaccggtgacggtgtcgtggaactcaggcgccctgaccagcggcgtgcacaccttcccggctgtcctacagtcctcaggac

SEQ ID NO: 294 - DNA, 766 bp, Artificial Sequence
  Synthetic construct
ggggatgctctctgagagtcatggatctcatgtgcaagaaaatgaagcacctgtggttcttcctcctgctggtggcggctcccaaatgtgccctgtcccagttgcaactacaggagtcgggcccaggactggtgaagccttcggagaccctgtccctcacctgcactgtctctggtggctccatcagtgctactaattactactgggcctggatccgccagtccccaggaaagggtctggactggatcgccatgattttttatagtgggagcacttattacaatccgtccctcagcagtcgagtcaccatttccgtggacacgtcgaagaatcagttctccctgaggctgacgtctgtgaccgccgctgacacggccatttatttttgtgcgaggcacaaacattatgatttttggaatggaggagggggctactactttgactcctggggccggggaaccctggtcaccgtctcctcagcctccaccaagggcccatcggtcttccccctggcaccctcctccaagagcacctctgggggcacagcggccctgggctgcctggtcaaggactacttccccgaaccggtgacggtgtcgtggaactcaggcgccctgaccagcggcgtgcacaccttcccggctgtcctacagtcctcaggactctactccctcagcagcgtggtgaccgtgccctccagcagcttgggcacccagacctacatctgcaacgtgaatcacaagcccagcaacaccaaggtggacaa

SEQ ID NO: 295 - DNA, 689 bp, Artificial Sequence
  Synthetic construct
ggggagggaaatgctctctgagagtcatggatctcatgtgcaagaaaatgaagcacctgtggttcttcctcctgctggtggcggctcccaaatgtgccctgtcccagttgcaactacaggagtcgggcccaggactggtgaagccttcggagaccctgtccctcacctgcactgtctctggtggctccatcagtgctactaattactactgggcctggatccgccagtccccaggaaagggtctggactggatcgccatgattttttatagtgggagcacttattacaatccgtccctcagcagtcgagtcaccatttccgtggacacgtcgaagaatcagttctccctgaggctgacgtctgtgaccgccgctgacacggccatttatttttgtgcgaggcacaaacattatgatttttggaatggaggagggggctactactttgactcctggggccggggaaccctggtcaccgtctcctcagcctccaccaagggcccatcggtcttccccctggcaccctcctccaagagcacctctgggggcacagcggccctgggctgcctggtcaaggactacttccccgaaccggtgacggtgtcgtggaactcaggcgccctgaccagcggcgtgcacaccttcccggctgtcctacagtcctcaggactctactccctcagcagcgtg

SEQ ID NO: 296 - DNA, 671 bp, Artificial Sequence
  Synthetic construct
gggatgctctctgagagtcatggatctcatgtgcaagaaaatgaagcacctgtggttcttcctcctgctggtggcggctcccaaatgtgccctgtcccagttgcaactacaggagtcgggcccaggactggtgaagccttcggagaccctgtccctcacctgcactgtctctggtggctccatcagtgctactaattactactgggcctggatccgccagtccccaggaaagggtctggactggatcgccatgattttttatagtgggagcacttattacaatccgtccctcagcagtcgagtcaccatttccgtggacacgtcgaagaatcagttctccctgaggctgacgtctgtgaccgccgctgacacggccatttatttttgtgcgaggcacaaacattatgatttttggaatggaggagggggctactactttgactcctggggccggggaaccctggtcaccgtctcctcagcctccaccaagggcccatcggtcttccccctggcaccctcctccaagagcacctctgggggcacagcggccctgggctgcctggtcaaggactacttccccgaaccggtgacggtgtcgtggaactcaggcgccctgaccagcggcgtgcacaccttcccggctgtcctacagtcctcaggactctactccc

SEQ ID NO: 297 - DNA, 790 bp, Artificial Sequence
  Synthetic construct
ggggaaattcaggtccaactcataagggaaatgctctctgagagtcatggatctcatgtgcaagaaaatgaagcacctgtggttcttcctcctgctggtggcggctcccaaatgtgccctgtcccagttgcaactacaggagtcgggcccaggactggtgaagccttcggagaccctgtccctcacctgcactgtctctggtggctccatcagtgctactaattactactgggcctggatccgccagtccccaggaaagggtctggactggatcgccatgattttttatagtgggagcacttattacaatccgtccctcagcagtcgagtcaccatttccgtggacacgtcgaagaatcagttctccctgaggctgacgtctgtgaccgccgctgacacggccatttatttttgtgcgaggcacaaacattatgatttttggaatggaggagggggctactactttgactcctggggccggggaaccctggtcaccgtctcctcagcctccaccaagggcccatcggtcttccccctggcaccctcctccaagagcacctctgggggcacagcggccctgggctgcctggtcaaggactacttccccgaaccggtgacggtgtcgtggaactcaggcgccctgaccagcggcgtgcacaccttcccggctgtcctacagtcctcaggactctactccctcagcagcgtggtgaccgtgccctccagcagcttgggcacccagacctacatctgcaacgtgaatcacaagcccagcaacaccaaggtggac

SEQ ID NO: 298 - DNA, 761 bp, Artificial Sequence
  Synthetic construct
ggctctctgagagtcatggatctcatgtgcaagaaaatgaagcacctgtggttcttcctcctgctggtggcggctcccaaatgtgccctgtcccagttgcaactacaggagtcgggcccaggactggtgaagccttcggagaccctgtccctcacctgcactgtctctggtggctccatcagtgctactaattactactgggcctggatccgccagtccccaggaaagggtctggactggatcgccatgattttttatagtgggagcacttattacaatccgtccctcagcagtcgagtcaccatttccgtggacacgtcgaagaatcagttctccctgaggctgacgtctgtgaccgccgctgacacggccatttatttttgtgcgaggcacaaacattatgatttttggaatggaggagggggctactactttgactcctggggccggggaaccctggtcaccgtctcctcagcctccaccaagggcccatcggtcttccccctggcaccctcctccaagagcacctctgggggcacagcggccctgggctgcctggtcaaggactacttccccgaaccggtgacggtgtcgtggaactcaggcgccctgaccagcggcgtgcacaccttcccggctgtcctacagtcctcaggactctactccctcagcagcgtggtgaccgtgccctccagcagcttgggcacccagacctacatctgcaacgtgaatcacaagcccagcaacaccaaggtggacaa

SEQ ID NO: 299 - DNA, 783 bp, Artificial Sequence
  Synthetic construct
gggaggtccaactcataagggaaatgctctctgagagtcatggatctcatgtgcaagaaaatgaagcacctgtggttcttcctcctgctggtggcggctcccaaatgtgccctgtcccagttgcaactacaggagtcgggcccaggactggtgaagccttcggagaccctgtccctcacctgcactgtctctggtggctccatcagtgctactaattactactgggcctggatccgccagtccccaggaaagggtctggactggatcgccatgattttttatagtgggagcacttattacaatccgtccctcagcagtcgagtcaccatttccgtggacacgtcgaagaatcagttctccctgaggctgacgtctgtgaccgccgctgacacggccatttatttttgtgcgaggcacaaacattatgatttttggaatggaggagggggctactactttgactcctggggccggggaaccctggtcaccgtctcctcagcctccaccaagggcccatcggtcttccccctggcgccctgctccaggagcacctccgagagcacagcggccctgggctgcctggtcaaggactacttccccgaaccggtgacggtgtcgtggaactcaggcgccctgaccagcggcgtgcacaccttcccggctgtcctacagtcctcaggactctactccctcagcagcgtggtgaccgtgccctccagcagcttgggcacccagacctacatctgcaacgtgaatcacaagcccagcaacaccaaggtggac

SEQ ID NO: 300 - DNA, 764 bp, Artificial Sequence
  Synthetic construct
ggggatgctctctgagagtcatggatctcatgtgcaagaaaatgaagcacctgtggttcttcctcctgctggtggcggctcccaaatgtgccctgtcccagttgcaactacaggagtcgggcccaggactggtgaagccttcggagaccctgtccctcacctgcactgtctctggtggctccatcagtgctactaattactactgggcctggatccgccagtccccaggaaagggtctggactggatcgccatgattttttatagtgggagcacttattacaatccgtccctcagcagtcgagtcaccatttccgtggacacgtcgaagaatcagttctccctgaggctgacgtctgtgaccgccgctgacacggccatttatttttgtgcgaggcacaaacattatgatttttggaatggaggagggggctactactttgactcctggggccggggaaccctggtcaccgtctcctcagcctccaccaagggcccatcggtcttccccctggcgccctgctccaggagcacctccgagagcacagcggccctgggctgcctggtcaaggactacttccccgaaccggtgacggtgtcgtggaactcaggcgccctgaccagcggcgtgcacaccttcccggctgtcctacagtcctcaggactctactccctcagcagcgtggtgaccgtgccctccagcagcttgggcacccagacctacatctgcaacgtgaatcacaagcccagcaacaccaaggtggac

SEQ ID NO: 301 - DNA, 728 bp, Artificial Sequence
  Synthetic construct
ggggatgctctctgagagtcatggatctcatgtgcaagaaaatgaagcacctgtggttcttcctcctgctggtggcggctcccaaatgtgccctgtcccagttgcaactacaggagtcgggcccaggactggtgaagccttcggagaccctgtccctcacctgcactgtctctggtggctccatcagtgctactaattactactgggcctggatccgccagtccccaggaaagggtctggactggatcgccatgattttttatagtgggagcacttattacaatccgtccctcagcagtcgagtcaccatttccgtggacacgtcgaagaatcagttctccctgaggctgacgtctgtgaccgccgctgacacggccatttatttttgtgcgaggcacaaacattatgatttttggaatggaggagggggctactactttgactcctggggccggggaaccctggtcaccgtctcctcagcctccaccaagggcccatcggtcttccccctggcgccctgctccaggagcacctccgagagcacagcggccctgggctgcctggtcaaggactacttccccgaaccggtgacggtgtcgtggaactcaggcgccctgaccagcggcgtgcacaccttcccggctgtcctacagtcctcaggactctactccctcagcagcgtggtgaccgtgccctccagcagcttgggcacccagacctacatctgc

SEQ ID NO: 302 - DNA, 765 bp, Artificial Sequence
  Synthetic construct
gggggatgctctctgagagtcatggatctcatgtgcaagaaaatgaagcacctgtggttcttcctcctgctggtggcggctcccaaatgtgccctgtcccagttgcaactacaggagtcgggcccaggactggtgaagccttcggagaccctgtccctcacctgcactgtctctggtggctccatcagtgctactaattactactgggcctggatccgccagtccccaggaaagggtctggactggatcgccatgattttttatagtgggagcacttattacaatccgtccctcagcagtcgagtcaccatttccgtggacacgtcgaagaatcagttctccctgaggctgacgtctgtgaccgccgctgacacggccatttatttttgtgcgaggcacaaacattatgatttttggaatggaggagggggctactactttgactcctggggccggggaaccctggtcaccgtctcctcagcctccaccaagggcccatcggtcttccccctggcaccctcctccaagagcacctctgggggcacagcggccctgggctgcctggtcaaggactacttccccgaaccggtgacggtgtcgtggaactcaggcgccctgaccagcggcgtgcacaccttcccggctgtcctacagtcctcaggactctactccctcagcagcgtggtgaccgtgccctccagcagcttgggcacccagacctacatctgcaacgtgaatcacaagcccagcaacaccaaggtggac

SEQ ID NO: 303 - DNA, 746 bp, Artificial Sequence
  Synthetic construct
ggggatgctctctgagagtcatggatctcatgtgcaagaaaatgaagcacctgtggttcttcctcctgctggtggcggctcccaaatgtgccctgtcccagttgcaactacaggagtcgggcccaggactggtgaagccttcggagaccctgtccctcacctgcactgtctctggtggctccatcagtgctactaattactactgggcctggatccgccagtccccaggaaagggtctggactggatcgccatgattttttatagtgggagcacttattacaatccgtccctcagcagtcgagtcaccatttccgtggacacgtcgaagaatcagttctccctgaggctgacgtctgtgaccgccgctgacacggccatttatttttgtgcgaggcacaaacattatgatttttggaatggaggagggggctactactttgactcctggggccggggaaccctggtcaccgtctcctcagcctccaccaagggcccatcggtcttccccctggcaccctcctccaagagcacctctgggggcacagcggccctgggctgcctggtcaaggactacttccccgaaccggtgacggtgtcgtggaactcaggcgccctgaccagcggcgtgcacaccttcccggctgtcctacagtcctcaggactctactccctcagcagcgtggtgaccgtgccctccagcagcttgggcacccagacctacatctgcaacgtgaatcacaagccc

SEQ ID NO: 304 - DNA, 767 bp, Artificial Sequence
  Synthetic construct
atggggatgctctctgagagtcatggatctcatgtgcaagaaaatgaagcacctgtggttcttcctcctgctggtggcggctcccaaatgtgccctgtcccagttgcaactacaggagtcgggcccaggactggtgaagccttcggagaccctgtccctcacctgcactgtctctggtggctccatcagtgctactaattactactgggcctggatccgccagtccccaggaaagggtctggactggatcgccatgattttttatagtgggagcacttattacaatccgtccctcagcagtcgagtcaccatttccgtggacacgtcgaagaatcagttctccctgaggctgacgtctgtgaccgccgctgacacggccatttatttttgtgcgaggcacaaacattatgatttttggaatggaggagggggctactactttgactcctggggccggggaaccctggtcaccgtctcctcagcctccaccaagggcccatcggtcttccccctggcaccctcctccaagagcacctctgggggcacagcggccctgggctgcctggtcaaggactacttccccgaaccggtgacggtgtcgtggaactcaggcgccctgaccagcggcgtgcacaccttcccggctgtcctacagtcctcaggactctactccctcagcagcgtggtgaccgtgccctccagcagcttgggcacccagacctacatctgcaacgtgaatcacaagcccagcaacaccaaggtggaca

SEQ ID NO: 305 - DNA, 934 bp, Artificial Sequence
  Synthetic construct
gagatgaacctttaagggttgaacacaactgaccctattccacaatctgtccttgatccagaatcacactcatctctcagaccagctccttcagcacatctctttaccgggaagaagaggactctgggcttggagaggggaggccccaagaagagaactgagttctcaaagggcacagccagcattctcctcccagggtccaactcataagggaaatgctctctgagagtcatggatctcatgtgcaagaaaatgaagcacctgtggttcttcctcctgctggtggcggctcccaaatgtgccctgtcccagttgcaactacaggagtcgggcccaggactggtgaagccttcggagaccctgtccctcacctgcactgtctctggtggctccatcagtgctactaattactactgggcctggatccgccagtccccaggaaagggtctggactggatcgccatgattttttatagtgggagcacttattacaatccgtccctcagcagtcgagtcaccatttccgtggacacgtcgaagaatcagttctccctgaggctgacgtctgtgaccgccgctgacacggccatttatttttgtgcgaggcacaaacattatgatttttggaatggaggagggggctactactttgactcctggggccggggaaccctggtcaccgtctcctcagcctccaccaagggcccatcggtcttccccctggcaccctcctccaagagcacctctgggggcacagcggccctgggctgcctggtcaaggactacttccccgaaccggtgacggtgtcgtggaactcaggcgccctgaccagcggcgtgcacaccttcccggctgtcctacagtcctcaggactctactccctcagcagcgtggtgaccgtgccctccagcagcttgtccaccttggtgttgc

SEQ ID NO: 306 - DNA, 717 bp, Artificial Sequence
  Synthetic construct
gggggctctctgagagtcatggatctcatgtgcaagaaaatgaagcacctgtggttcttcctcctgctggtggcggctcccaaatgtgccctgtcccagttgcaactacaggagtcgggcccaggactggtgaagccttcggagaccctgtccctcacctgcactgtctctggtggctccatcagtgctactaattactactgggcctggatccgccagtccccaggaaagggtctggactggatcgccatgattttttatagtgggagcacttattacaatccgtccctcagcagtcgagtcaccatttccgtggacacgtcgaagaatcagttctccctgaggctgacgtctgtgaccgccgctgacacggccatttatttttgtgcgaggcacaaacattatgatttttggaatggaggagggggctactactttgactcctggggccggggaaccctggtcaccgtctcctcagcctccaccaagggcccatcggtcttccccctggcaccctcctccaagagcacctctgggggcacagcggccctgggctgcctggtcaaggactacttccccgaaccggtgacggtgtcgtggaactcaggcgccctgaccagcggcgtgcacaccttcccggctgtcctacagtcctcaggactctactccctcagcagcgtggtgaccgtgccctccagcagcttgggcacccagacc

SEQ ID NO: 307 - DNA, 795 bp, Artificial Sequence
  Synthetic construct
ggggagctctgggagacgagcccagcagtggaagtcgccggtgtttccattcggtgatcataactgaacacagaggactcaccatggagtttgggctgagctgggttttcctcgttgctctcttaagaggtctccagtgtcagggagaactggtggaatctgggggaggcgtggtccagcctgggaggtccctgagactctcctgtgcagcccccggatacaccctcaggacctatgctatgcactgggtccgccaggctccaggcaaggggctggaatggctggcggttatttcatatgatggaaagaagaaaaattatcgacaatccgtgaagggccgattcaccatctccagagacaattccaagaatacggtctatttgcaaatggacaggctgagaagtgacgacacggctgtttatttctgtgcgacaggtgatggcagtgggtggtcatggtcattattttattcggaacactggggccagggaacccaggtcaccgtctcctcagcttccaccaagggcccatcggtcttccccctggcgccctgctccaggagcacctctgggggcacagcggccctgggctgcctggtcaaggactacttccccgaaccggtgacggtgtcgtggaactcaggcgccctgaccagcggcgtgcacaccttcccggctgtcctacagtcctcaggactctactccctcagcagcgtggtgaccgtgccctccagcagcttgggcacccagacctacacctgcaacgtgaatcacaagcccagcaacaccaaggtgg

SEQ ID NO: 308 - DNA, 693 bp, Artificial Sequence
  Synthetic construct
ggggctctgagagaggagcccagccctgggattttcaggtgttttcatttggtgatcaggactgaacagagagaactcaccatggagtttgggctgaggtggctttttcttgtggctattttaaaaggtgtccagtgtgaggtggagttgttggagtctgggggaggcctgatacagcctggggggtccctgagactctcctgtgcagcctctggattcacctttagtcgctatgccatgagttgggtccgccaggctccagggaaggggctagagtggatcgcaagtattgttgggagcggaattggctcatattccgtagacttcgtgaagggccggtttaccatctacagagacaatcccaagaatacgttatatttgcagatgaacagcctgagagccgaagacacggccatatatttctgtgtcaaaggaggcggctacaaccccctccataaggcacttttctttgaccactggggccagggaaccctggtcaccgcctcctcagcctccaccaagggcccatcggtcttccccctggcaccctcctccaagagcacctctgggggcacagcggccctgggctgcctggtcaaggactacttccccgaaccggtgacggtgtcgtggaactcaggcgccctgaccagcggcgtgcacaccttcccggctgtcctacagtcctcagga

SEQ ID NO: 309 - DNA, 735 bp, Artificial Sequence
  Synthetic construct
gggccctctactgatgaaaaccagcccagccctgaccctgcagctctgggagacgagcccagcactggaagtcgccggtgtttccattcggtgatcatcactgaacacagaggactcaccatggagtttgggctgagctgggttctcctcgttgctcttttaagaggtgtccagtgtcaggtgcagttggtggagtctgggggaggcgtggtccagcctgggaagtccgtgagactgtcctgtgaagcctctggattcaatttcaggaattatgctatgcactgggtccgccaggctccaggcaaggggctggagtgggtggcgctgatttcacatgatggaaggaatcaaaagtatgtggcctccgtgaagggccgatttaccatctccagagacaactccaaaaacaggctgcatctgcaaatcagcagcctgaagtctgacgacacggctgtttattattgtggacgagaaaggttgttcccgcagcagaacatacagggcaattggttcgacccctggggccagggaaccctggtcaccgtctcctcagcctccaccaagggcccatcggtcttccccctggcaccctcctccaagagcacctctgggggcacagcggccctgggctgcctggtcaaggactacttccccgaaccggtgacggtgtcgtggaactcaggcgccctgaccagcggcgtgcacaccttcccggctgtcctacagtcctcagga

SEQ ID NO: 310 - DNA, 692 bp, Artificial Sequence
  Synthetic construct
ggggagttctgagagaggagcccagccctgggattttcaggtgttttcatttggtgatcaggactgaacagagagaactcaccatggagtttgggctgaactggctttttcttgtggctcttttaaaaggtgtccaatgcgaagtgcaattgttggagtctgggggacaattggtgcagccgggggggtccctgagactctcttgtccagtctctggattcaactttcgcacctatgccatgacttgggtccgccagcctccagggaagggcctggagtgggtctcatctataactggcagtggtattgccacatattacgtaggctccgtgaagggccgcttctccatctccagagacaattccaagaacactctgtatctccaaatgaacagcctgagagtcgacgacacggccgtatattattgtgtgaaactgacagcctttgcggttcggggaaccacatactttgactcctggggccggggaaccttggtcaccgtctcctcagcctccaccaagggcccatcggtcttccccctggcaccctcctccaagagcacctctgggggcacagcggccctgggctgcctggtcaaggactacttccccgaaccggtgacggtgtcgtggaactcaggcgccctgaccagcggcgtgcacaccttcccggctgtcctacagtcctcagga

SEQ ID NO: 311 - DNA, 690 bp, Artificial Sequence
  Synthetic construct
gggagccccagccctgggattcccagctgtttctgcttgctgatcaggactgcacacagagagctcaccatggactttgggctgacctgtgttttccttgttgctattttaacaggtgtccagtgtgaggtgcagctggcgcagtccgggggaggcttatttccgccgggggggtctctgagactctcctgtgcagcctctggattcaacttcaataaatactggatgcattgggtccgccaagtcccagggaaggggctcgagtgggtcgcacttataaataaggatggcagtatcacaacatacgaagactccgtgaagggccgattcaccatctccagagacaacgccaagaatacactgtatttgcaaatgaataatctgcgtggcgaggacacggctctctattattgtacacgagaagaacaatatagtaatagtaagtggcggacgaccccgacgaaatttgactcctggggccagggaaccctggtcatcgcctcctcagcctccaccaagggcccatcggtcttccccctggcaccctcctccaagagcacctctgggggcacagcggccctgggctgcctggtcaaggactacttccccgaaccggtgacggtgtcgtggaactcaggcgccctgaccagcggcgtgcacaccttcccggctgtcctacagtcctcagga

SEQ ID NO: 312 - DNA, 695 bp, Artificial Sequence
  Synthetic construct
ggggagctctgggagacgagcccagcagtggaagtcgccggtgtttccattcggtgatcataactgaacacagaggactcaccatggagtttgggctgagctgggttttcctcgttgctctcttaagaggtctccagtgtcagggagaactggtggaatctgggggaggcgtggtccagcctgggaggtccctgagactctcctgtgcagcccccggatacaccctcaggacctatgctatgcactgggtccgccaggctccaggcaaggggctggaatggctggcggttatttcatatgatggaaagaagaaaaattatcgacaatccgtgaagggccgattcaccatctccagagacaattccaagaatacggtctatttgcaaatggacaggctgagaagtgacgacacggctgtttatttctgtgcgacaggtgatggcagtgggtggtcatggtcattattttattcggaacactggggccagggaacccaggtcaccgtctcctcagcttccaccaagggcccatcggtcttccccctggcgccctgctccaggagcacctccgagagcacagcggccctgggctgcctggtcaaggactacttccccgaaccggtgacggtgtcgtggaactcaggcgccctgaccagcggcgtgcacaccttcccggctgtcctacagtcctcagga

SEQ ID NO: 313 - DNA, 836 bp, Artificial Sequence
  Synthetic construct
gcctctactgatgaaaaccagcccagccctgaccctgcagctctgggagacgagcccagcactggaagtcgccggtgtttccattcggtgatcatcactgaacacagaggactcaccatggagtttgggctgagctgggttctcctcgttgctcttttaagaggtgtccagtgtcaggtgcagttggtggagtctgggggaggcgtggtccagcctgggaagtccgtgagactgtcctgtgaagcctctggattcaatttcaggaattatgctatgcactgggtccgccaggctccaggcaaggggctggagtgggtggcgctgatttcacatgatggaaggaatcaaaagtatgtggcctccgtgaagggccgatttaccatctccagagacaactccaaaaacaggctgcatctgcaaatcagcagcctgaagtctgacgacacggctgtttattattgtggacgagaaaggttgttcccgcagcagaacatacagggcaattggttcgacccctggggccagggaaccctggtcaccgtctcctcagcctccaccaagggcccatcggtcttccccctggcaccctcctccaagagcacctctgggggcacagcggccctgggctgcctggtcaaggactacttccccgaaccggtgacggtgtcgtggaactcaggcgccctgaccagcggcgtgcacaccttcccggctgtcctacagtcctcaggactctactccctcagcagcgtggtgaccgtgccctccagcagcttgggcacccagacctacatctgcaacgtgaatcacaagcccagcaacaccaaggtggacaa

SEQ ID NO: 314 - DNA, 760 bp, Artificial Sequence
  Synthetic construct
atctggggagactttcggggagtcctggacctcctgtgcaagaacatgaaacatctgtggttcttccttctcctggtgccagctcccagatgggtcctgtcccaggtgcagctgcaggagtcgggcccaggagtggtgaagacttcggagaccctgtccctcacctgcactgtgtctggtggctccatgactacttactactggagttggattcggcagcccccagggaagggactggagtggcttggatacatctattatactgggaagtctagttatgccccctccctcaggagtcgactttccatgtcacttgacacgtccaagaacctgttctccctgaggttgggctctgcgaccgctgcggacacggccgtctattactgtgcgagaggctttcgaccttcacctttcagtgaccacccatattattttgactactggggccggggaaccctgctcaccgtctcctcaccctccaccaagggcccatcggtcttccccctggcgccctgctccaggagcacctccgagagcacagcggccctgggctgcctggtcaaggactacttccccgaaccggtgacggtgtcgtggaactcaggcgccctgaccagcggcgtgcacaccttcccggctgtcctacagtcctcaggactctattccctcagcagcgtggtgaccgtgccctccagcaacttcggcacccagacctacacctgcaacgtagatcacaagcccagcaacaccaaggtggaca

SEQ ID NO: 315 - DNA, 724 bp, Artificial Sequence
  Synthetic construct
gaaattcaggttccagctcacatgggagagactttcggggagtcctggacctcctgtgcaagaacatgaaacatctgtggttcttccttctcctggtgccagctcccagatgggtcctgtcccaggtgcagctgcaggagtcgggcccaggagtggtgaagacttcggagaccctgtccctcacctgcactgtgtctggtggctccatgactacttactactggagttggattcggcagcccccagggaagggactggagtggcttggatacatctattatactgggaagtctagttatgccccctccctcaggagtcgactttccatgtcacttgacacgtccaagaacctgttctccctgaggttgggctctgcgaccgctgcggacacggccgtctattactgtgcgagaggctttcgaccttcacctttcagtgaccacccatattattttgactactggggccggggaaccctgctcaccgtctcctcaccctccaccaagggcccatcggtcttccccctggcgccctgctccaggagcacctccgagagcacagcggccctgggctgcctggtcaaggactacttccccgaaccggtgacggtgtcgtggaactcaggcgccctgaccagcggcgtgcacaccttcccggctgtcctacagtcctcaggactctactccctcagcagcgtggtgaccgtgaccgccagaaacttccc

SEQ ID NO: 316 - DNA, 701 bp, Artificial Sequence
  Synthetic construct
gggacctctgggagaagagccccagccccagaattcccaggagtttccattcggtgatcagcactgaacacagaggactcaccatggagtttgggttgagctgggttttccttgttgctatgataaaaggtgtccagtgtcaggtgcagctggtggagtctgggggaggcttggtcaagcctggagggtccctgagactctcctgtgcaacgtctggattcggcttcagtgatttctacatgagttggatacgtcaggctccagggaagggcctggaatgtgttggatacattagtcctcgtggtgttgtcatccattatgccgactctgtgaagggccgattcaccatctccagggacaacaccaggaaatcactgcatctgcaaatgaacagcctgagagtcgacgactcggccgtctatttctgtgcgagagacagggacaacgattattctgacagtagtggttatgggtggttcgactcttggggccagggaacccaggtcaccgtctcctcagcctccaccaagggcccatcggtcttccccctggcaccctcctccaagagcacctctgggggcacagcggccctgggctgcctggtcaaggactacttccccgaaccggtgacggtgtcgtggaactcaggcgccctgaccagcggcgtgcacaccttcccggctgtcctacagtcctcagga

SEQ ID NO: 317 - DNA, 784 bp, Artificial Sequence
  Synthetic construct
ggagtctccctcactgcccagctgggatctcagggcttcattttctgtcctcccccatcatggggtcaaccgccatcgtcgtcctcctcctggctgttctccaaggagtctgtgccgaggtgcagctggagcagtctggagcagaggtgaaggaggccggggagtctctgcagatttcctgtaaggcttctggatacagttttggcctcttctggatcgcctgggtgcgccagatgcccgggaaaggcctggagtggatgggcattatctatcctgatgacgctgacaccacatacagtccgtccttccaaggccgggtcaccatctcagccgacaagtccaaaaatatagcctacctacagtggagcagtttgaaggtctcggacagcgccatttattactgcgcgcgacagggggaagattgtacttctggcagctgccagtccgatcccggtttggacgcctggggccaagggaccacggtcatcgtctcctcagcctccaccaagggcccatcggtcttccccctggcaccctcctccaagagcacctctgggggcacagcggccctgggctgcctggtcaaggactacttccccgaaccggtgacggtgtcgtggaactcaggcgccctgaccagcggcgtgcacaccttcccggctgtcctacagtcctcaggactctactccctcagcagcgtggtgaccgtgccctccagcagcttgggcacccagacctacatctgcaacgtgaatcacaagcccagcaacaccaaggtggacaa

SEQ ID NO: 318 - DNA, 814 bp, Artificial Sequence
  Synthetic construct
gggagctctgggagacgagcccagcactggaagtcgccggtgtttccattcggtgatcatcactgaacacagaggactcaccatggagtttgggctgagctgggttttcctcgttgctcttttaagaggtgtccagtgtcaggtacaactagtggagtctgggggaggcgtggtccagcctgggaggtccctgagactcgcttgcacaggctctggattcaccttcgatgcccactctattcactgggtccgccaggctccaggcaaggggctgcagtgggtggctattatatcatttgatgcaaacaagaacaacttcgcagagtccgtgaggggccgattcgccatctccagagacaattccaagaacacagtctttctgcaaatgaacagcctgagacctgaggacacggctgtgtatttctgtgcgagagatgccacttccaagttccacccggcattttttcttaatcgcggatcgggctacatggacgtctggggcaaagggaccacggtcatcgtttcctcagcctccaccaagggcccatcggtcttccccctggcaccctcctccaagagcacctctgggggcacagcggccctgggctgcctggtcaaggactacttccccgaaccggtgacggtgtcgtggaactcaggcgccctgaccagcggcgtgcacaccttcccggctgtcctacagtcctcaggactctactccctcagcagcgtggtgaccgtgccctccagcagcttgggcacccagacctacatctgcaacgtgaatcacaagcccagcaacaccaaggtggac

SEQ ID NO: 319 - DNA, 693 bp, Artificial Sequence
  Synthetic construct
ggggagctctgggagaagagccccagccccagaattcccaggagtttccattcggtgatcagcactgaacacagaggactcaccatggagtttgggctgagctgggttttccttgctgttattatgaaaggtgtccagtgtcaggtgcagctggtggagtctgggggaggcttggtcaagcctggaaggtccctgagactgtcctgtgtggcctcaggattcagtttcattgactaccacatgacttggatccgccaggctcctgggaaggggctggagtggctttcatatattagtagtagtggtactaatatggattatacagactctgtgaggggccgattcaccatctctagagacaacgcccagaactcactttttctgcacatggacgacctgagagtcgaagacacggccgtgtatttctgtgcgaggcgggctggaaggttccccttttatcactactacatggacgtctggggcaaagggaccacggtcaccgtctcctcagcctccaccaagggcccatcggtcttccccctggcaccctcctccaagagcacctctgggggcacagcggccctgggctgcctggtcaaggactacttccccgaaccggtgacggtgtcgtggaactcaggcgccctgaccagcggcgtgcacaccttcccggctgtcctacagtcctcagga

SEQ ID NO: 320 - DNA, 815 bp, Artificial Sequence
  Synthetic construct
ggggagctctgggagacgagcccagcactggaagtcgccggtgtttccattcggtgatcatcactgaacacagaggactcaccatggagtttgggctgagctgggttttcctcgttgctcttttaagaggtgtccagtgtcaggtacaactagtggagtctgggggaggcgtggtccagcctgggaggtccctgagactcgcttgcacaggctctggattcaccttcgatgcccactctattcactgggtccgccaggctccaggcaaggggctgcagtgggtggctattatatcatttgatgcaaacaagaacaacttcgcagagtccgtgaggggccgattcgccatctccagagacaattccaagaacacagtctttctgcaaatgaacagcctgagacctgaggacacggctgtgtatttctgtgcgagagatgccacttccaagttccacccggcattttttcttaatcgcggatcgggctacatggacgtctggggcaaagggaccacggtcatcgtttcctcagcctccaccaagggcccatcggtcttccccctggcaccctcctccaagagcacctctgggggcacagcggccctgggctgcctggtcaaggactacttccccgaaccggtgacggtgtcgtggaactcaggcgccctgaccagcggcgtgcacaccttcccggctgtcctacagtcctcaggactctactccctcagcagcgtggtgaccgtgccctccagcagcttgggcacccagacctacatctgcaacgtgaatcacaagcccagcaacaccaaggtggac

SEQ ID NO: 321 - DNA, 654 bp, Artificial Sequence
  Synthetic construct
agcatcatccaacaaccacatcccttctctacagaagcctctgagaggaaagttcttcaccatggactggacctggagggtcttctgcttgttggcggtagctccaggtgctcgctcccaggtgcagctggtgcagtctggggctgaggtgaagaagactggggcctcagtgaaactttcctgcaagtcatctgaatacaccttcaccagttactatgtccattgggtgcgacaggcccctggacaagggctggagtggatgggcataatgaagccgaccggtagcacagactacgcacataagttccagggcagagtcactatgaccagggacacgtcaacgagcactgactatttggagttgactagtctcagatttgaggacacggccatatattactgtgcgagagatagactgtggaggaccccctccgggctctggggccagggaaccctggtcaccgtctcctcagcctccaccaagggcccatcggtcttccccctggcaccctcctccaagagcacctctgggggcacagcggccctgggctgcctggtcaaggactacttccccgaaccggtgacggtgtcgtggaactcaggcgccctgaccagcggcgtgcacaccttcccggctgtcctacagtcctcagg

SEQ ID NO: 322 - DNA, 684 bp, Artificial Sequence
  Synthetic construct
gggggagcatcacataaccaccacattcctcctctgaagaagcccctgggagcacagctcgtcaccatggactggacctggaggttcctctttgtggtggcagcagctacaggtgtccagtcccaggtccagctggtgcagtctggggctgaggtgaagaagcctgggtcctcagtgaaggtctcctgcaaggcttctggaggctcattcggcagccgtactatcaactgggtgcgacaggcccccggacaaggacttcagtggatgggcagggtcaaccctttctttgggacagcagactacgcacagacattgcagggcagactcctaattacagtggacgcatcaacgagctcagcctacatggaactgagcggcctgagatcggacgacacggccgtctattactgtgcgacggagagggggatggttcaagtcgcccatgcgggcgggggcttttttgacttctggggccagggagccctggtcaccgtctcctcagcctccaccaagggcccatcggtcttccccctggcaccctcctccaagagcacctctgggggcacagcggccctgggctgcctggtcaaggactacttccccgaaccggtgacggtgtcgtggaactcaggcgccctgaccagcggcgtgcacaccttcccggctgtcctacagtcctcagga

SEQ ID NO: 323 - DNA, 683 bp, Artificial Sequence
  Synthetic construct
ggggagcatcacataaccaccacattcctcctctgaagaagcccctgggagcacagctcgtcaccatggactggacctggaggttcctctttgtggtggcagcagctacaggtgtccagtcccaggtccagctggtgcagtctggggctgaggtgaagaagcctgggtcctcagtgaaggtctcctgcaaggcttctggaggctcattcggcagccgtactatcaactgggtgcgacaggcccccggacaaggacttcagtggatgggcagggtcaaccctttctttgggacagcagactacgcacagacattgcagggcagactcctaattacagtggacgcatcaacgagctcagcctacatggaactgagcggcctgagatcggacgacacggccgtctattactgtgcgacggagagggggatggttcaagtcgcccatgcgggcgggggcttttttgacttctggggccagggagccctggtcaccgtctcctcagcctccaccaagggcccatcggtcttccccctggcaccctcctccaagagcacctctgggggcacagcggccctgggctgcctggtcaaggactacttccccgaaccggtgacggtgtcgtggaactcaggcgccctgaccagcggcgtgcacaccttcccggctgtcctacagtcctcagga

SEQ ID NO: 324 - DNA, 805 bp, Artificial Sequence
  Synthetic construct
cacagggagtttcttatatggggacccaaaaaccacacccctccttgggagaatcccctagatcacagctcctcaccatggactggacctggagcatccttttcttggtggcagcagcaacaggtgcccactcccaggttcagctgctgcagtctggagctgaggtgaagaagcctggggcctcagtgaaggtcgcctgcaagacttctggttatcgtttcaccaactttggtatcacctggatgcgacaggcccctggaggagggcttgagtggatgggatggatcagcgctttcaatggtcaaacacaatatgcacggaaattccagggcagagtcaccatgaccactgatacaggcacggccacagcctatctggagttgaggagcctgaagtctgacgacacggccgtgtatttctgtgcgcgccgctatttttatgatacacctggtgacttcttgctcgagacttactactttgattactggggccagggaaccctggtcaccgtctcctcagcctccaccaagggcccatcggtcttccccctggcgccctgctccaggagcacctctgggggcacagcggccctgggctgcctggtcaaggactacttccccgaaccggtgacggtgtcgtggaactcaggcgccctgaccagcggcgtgcacaccttcccggctgtcctacagtcctcaggactctactccctcagcagcgtggtgaccgtgccctccagcagcttgggcacccagacctacatctgcaacgtgaatcacaagcccagcaacaccaaggtggacaa

SEQ ID NO: 325 - DNA, 692 bp, Artificial Sequence
  Synthetic construct
ggggagctctgagagaggagcccagccctgggattttcaggtgttttcatttggtgatcaggactgaacagagagaactcaccatggagtttgggctgagttggctttttcttgtggctattttaaaagatgtccagtgtgaagtacagctgttggactctgggggaggcttggtacagcctgggggttccctcagactctcctgtgtagcttctggattcacctttagcgactatgccatgagctgggttcgccaggctcctgggaaggggctggagtgggtctcagcaattagcacttctgatgagagtaggacctattactcagactccgtgaagggccgtttcaccatctccagagacgattccaagagcacggtgtatttgcaaatgaccagtctgcgagccgaggacgcggccgtctatcgctgtacgccccttgtagtggtgataattggtaatgagtggttcgacccctggggccagggaaccctggtcatcgtctcctcagcctccaccaagggcccatcggtcttccccctggcaccctcctccaagagcacctctgggggcacagcggccctgggctgcctggtcaaggactacttccccgaaccggtgacggtgtcgtggaactcaggcgccctgaccagcggcgtgcacaccttcccggctgtcctacagtcctcagga

SEQ ID NO: 326 - DNA, 827 bp, Artificial Sequence
  Synthetic construct
gggggggagaggagccccagccgtgaggttcccaggactttccacttggtgatcagcactgaacacagaccaccaaccatggaatttgggcttagctgggttttccttgttgctcttttaaaaggtgtccgatgtgaggtgcaattggtggcgtctgggggtggcttggtccagccggggcggtccctgagactctcttgtcgaggttcgggattcacctttggtgaatatgctatgacgtggtttcggcaggctccagggaaggggctggaatggataggattcatcaggagcaaatcttatgacgggacaacagaatacgccgcgtctgtgcagggcagattcagcatctcaagagacgattccaacagtatcgcctttctgcaaatgaacagcctgaaaatcgaggacacagccgtctattattgtactaggttcgaggatgatactaatggttattactaccgacgagtcttccgcgggagggacactggtaggattgacccatggggccagggaaccctggtcaccgtctcctcagcctccaccaagggcccatcggtcttccccctggcgccctgctccaggagcacctctgggggcacagcggccctgggctgcctggtcaaggactacttccccgaaccggtgacggtgtcgtggaactcaggcgccctgaccagcggcgtgcacaccttcccggctgtcctacagtcctcaggactctactccctcagcagcgtggtgaccgtgccctccagcagcttgggcacccagacctacacctgcaacgtgaatcacaagcccagcaacaccaaggtggacaa

SEQ ID NO: 327 - DNA, 727 bp, Artificial Sequence
  Synthetic construct
gagctctgggagaggagccccagccgtgaggttcccaggactttccacttggtgatcagcactgaacacagaccaccaaccatggaatttgggcttagctgggttttccttgttgctcttttaaaaggtgtccgatgtgaggtgcaattggtggcgtctgggggtggcttggtccagccggggcggtccctgagactctcttgtcgaggttcgggattcacctttggtgaatatgctatgacgtggtttcggcaggctccagggaaggggctggaatggataggattcatcaggagcaaatcttatgacgggacaacagaatacgccgcgtctgtgcagggcagattcagcatctcaagagacgattccaacagtatcgcctttctgcaaatgaacagcctgaaaatcgaggacacagccgtctattattgtactaggttcgaggatgatactaatggttattactaccgacgagtcttccgcgggagggacactggtaggattgacccatggggccagggaaccctggtcaccgtctcctcagcctccaccaagggcccatcggtcttccccctggcaccctcctccaagagcacctctgggggcacagcggccctgggctgcctggtcaaggactacttccccgaaccggtgacggtgtcgtggaactcaggcgccctgaccagcggcgtgcacaccttcccggctgtcctacagtcctcaggac

SEQ ID NO: 328 - DNA, 749 bp, Artificial Sequence
  Synthetic construct
ggggagctctgggagaggagccccagccgtgaggttcccaggactttccacttggtgatcagcactgaacacagaccaccaaccatggaatttgggcttagctgggttttccttgttgctcttttaaaaggtgtccgatgtgaggtgcaattggtggcgtctgggggtggcttggtccagccggggcggtccctgagactctcttgtcgaggttcgggattcacctttggtgaatatgctatgacgtggtttcggcaggctccagggaaggggctggaatggataggattcatcaggagcaaatcttatgacgggacaacagaatacgccgcgtctgtgcagggcagattcagcatctcaagagacgattccaacagtatcgcctttctgcaaatgaacagcctgaaaatcgaggacacagccgtctattattgtactaggttcgaggatgatactaatggttattactaccgacgagtcttccgcgggagggacactggtaggattgacccatggggccagggaaccctggtcaccgtctcctcagcctccaccaagggcccatcggtcttccccctggcaccctcctccaagagcacctctgggggcacagcggccctgggctgcctggtcaaggactacttccccgaaccggtgacggtgtcgtggaactcaggcgccctgaccagcggcgtgcacaccttcccggctgtcctacagtcctcaggactctactccctcagcagcgt

SEQ ID NO: 329 - DNA, 699 bp, Artificial Sequence
  Synthetic construct
tggggagctctgggagacgagcccagcactgggagtcgccggtgtttccattcggtgatcatcactgaacacagaggactcaccatggagtttgggctgagctgggttttcctcgttgctcttttaagaggtgtccaatgtcaggagaaactggtggagtctgggggaggcgtggtccagcctgggaagtccctgcgactgtcctgtgcagcctctggattcagtttcagtagatatgccatacactgggtccgccgggctccaggcaaggggctggaatggatgacaagtatatcgtctgatggaaataataagaagttcgcagactccgtgaagggccgattcaccatctccagagacaattccaagaacacggtgtatttgcaaatgaatagcctgagacctgacgacacgggtctttatttctgtgcgcgagaaagggtgtttccgcagcagtctattttgggcagttggttcgacccctggggccagggaaccctggtcagcgtctcctcagcctccaccaagggcccatcggtcttccccctggcaccctcctccaagagcacctctgggggcacagcggccctgggctgcctggtcaaggactacttccccgaaccggtgacggtgtcgtggaactcaggcgccctgaccagcggcgtgcacaccttcccggctgtcctacagtcctcagga

SEQ ID NO: 330 - DNA, 674 bp, Artificial Sequence
  Synthetic construct
gggatggaaaatattttctgagagtcctgcacctcctgtgcaggaacatgaaacatctgtggttcttcctcctcctggtggcagctcccagatgggtcttgtcccaggtgcagctgcacgagtcgggcccaggactggtgaagccttcacagaccctgtccctcagctgcagcgtctctggtgcctccattactagtggcagcttctactgggtctggctccggcagcccgccgggaagggactggagtggattgggcgtgtcaattcctttgggaacaccaactataatccctccctcacgagtcgaatcaccatatcagtggacacgtccaagaaccagttcttcctgaccctgacatctatgaccgccgcagacacggccgtgtacttctgtgcgaggggctcttaccgtgatcgaagtggtaatctaagacttggggcgcgctggtacgactcctggggccagggagccctggtcaccgtctcctcagcctccaccaagggcccatcggtcttccccctggcaccctcctccaagagcacctctgggggcacagcggccctgggctgcctggtcaaggactacttccccgaaccggtgacggtgtcgtggaactcaggcgccctgaccagcggcgtgcacaccttcccggctgtcctacagtcctcagga

SEQ ID NO: 331 - DNA, 816 bp, Artificial Sequence
  Synthetic construct
ggggagctctgggagacgagcccagcactggaagtcgccggtgtttccattcggtgatcatcactgaacacagaggactcaccatggagtttgggctgagctgtgttctcctcattactcttttaagaggtgtccagtgtcaggttcaattgatggagtcggggggaggcgtggtccagcctggggggtccctgcgactctcatgtgcagcctctggattcaccttcaataactatgctgtgcactgggtccgccaggctccaggcaaggggctggaatggctggcagttatatcacatgatggcaacaacaaattcatcgtagactccgtgaagggccgattcaccatcgccagagacaattccaaggacacactattcctgcagatgaacagcctgagacttgatgacacggctgtgtatttctgtgcgaaagatggcacctccaagtaccagccggccttttttgttcatcgcggatcggactacatggacgtctggggcaaagggaccacggtcatcgtctcctcagcctccaccaagggcccatcggtcttccccctggcaccctcctccaagagcacctctgggggcacagcggccctgggctgcctggtcaaggactacttccccgaaccggtgacggtgtcgtggaactcaggcgccctgaccagcggcgtgcacaccttcccggctgtcctacagtcctcaggactctactccctcagcagcgtggtgaccgtgccctccagcagcttgggcacccagacctacatctgcaacgtgaatcacaagcccagcaacaccaaggtggaca

SEQ ID NO: 332 - DNA, 703 bp, Artificial Sequence
  Synthetic construct
tatgggagttctcagggaggtgccttagccctggattccaaggcatttccacttggtgatcagcactgaacacagaggactcaccatggagttggggctgtactgggttttccttgttgctcttttagaaggtgtccagtgtgaggtgcagttgctggagtcggggggaggcttggtacagcctggggggtccctgagactctcctgtgcagcctctggattttccttcaacatctatagcatgaattgggtccgccaggctccagagaaggggctggagtggatttcatacattagcagtactggcaccaacatattctacgcagactctgtgaggggccgattcaccatctctagagacaatggcaggaattcagtgtttctgcaaatgaacagcctgagagtcgaagacacgggtatttatttctgtgcaagagatagcgaattccgccaatggtttggggagttgccgcacccattggaatactggggccggggaatccgagtcaccgtctccgcagcctccaccaagggcccatcggtcttccccctggcaccctcctccaagagcacctctgggggcacagcggccctgggctgcctggtcaaggactacttccccgaaccggtgacggtgtcgtggaactcaggcgccctgaccagcggcgtgcacaccttcccggctgtcctacagtcctcagga

SEQ ID NO: 333 - DNA, 803 bp, Artificial Sequence
  Synthetic construct
ggggagttctcagggaggtgccttagccctggattccaaggcatttccacttggtgatcagcactgaacacagaggactcaccatggagttggggctgtactgggttttccttgttgctcttttagaaggtgtccagtgtgaggtgcagttgctggagtcggggggaggcttggtacagcctggggggtccctgagactctcctgtgcagcctctggattttccttcaacatctatagcatgaattgggtccgccaggctccagagaaggggctggagtggatttcatacattagcagtactggcaccaacatattctacgcagactctgtgaggggccgattcaccatctctagagacaatggcaggaattcagtgtttctgcaaatgaacagcctgagagtcgaagacacgggtatttatttctgtgcaagagatagcgaattccgccaatggtttggggagttgccgcacccattggaatactggggccggggaatccgagtcaccgtctccgcagcctccaccaagggcccatcggtcttccccctggcgccctgctccaggagcacctccgagagcacagcggccctgggctgcctggtcaaggactacttccccgaaccggtgacggtgtcgtggaactcaggcgccctgaccagcggcgtgcacaccttcccggctgtcctacagtcctcaggactctactccctcagcagcgtggtgaccgtgccctccagcaacttcggcacccagacctacacctgcaacgtagatcacaagcccagcaacaccaaggtggac

SEQ ID NO: 334 - DNA, 701 bp, Artificial Sequence
  Synthetic construct
ggggagttctcagggaggtgccttagccctggattccaaggcatttccacttggtgatcagcactgaacacagaggactcaccatggagttggggctgtactgggttttccttgttgctcttttagaaggtgtccagtgtgaggtgcagttgctggagtcggggggaggcttggtacagcctggggggtccctgagactctcctgtgcagcctctggattttccttcaacatctatagcatgaattgggtccgccaggctccagagaaggggctggagtggatttcatacattagcagtactggcaccaacatattctacgcagactctgtgaggggccgattcaccatctctagagacaatggcaggaattcagtgtttctgcaaatgaacagcctgagagtcgaagacacgggtatttatttctgtgcaagagatagcgaattccgccaatggtttggggagttgccgcacccattggaatactggggccggggaatccgagtcaccgtctccgcagcctccaccaagggcccatcggtcttccccctggcgccctgctccaggagcacctccgagagcacagcggccctgggctgcctggtcaaggactacttccccgaaccggtgacggtgtcgtggaactcaggcgccctgaccagcggcgtgcacaccttcccggctgtcctacagtcctcagga

SEQ ID NO: 335 - DNA, 701 bp, Artificial Sequence
  Synthetic construct
ggggagttctcagggaggtgccttagccctggattccaaggcatttccacttggtgatcagcactgaacacagaggactcaccatggagttggggctgtactgggttttccttgttgctcttttagaaggtgtccagtgtgaggtgcagttgctggagtcggggggaggcttggtacagcctggggggtccctgagactctcctgtgcagcctctggattttccttcaacatctatagcatgaattgggtccgccaggctccagagaaggggctggagtggatttcatacattagcagtactggcaccaacatattctacgcagactctgtgaggggccgattcaccatctctagagacaatggcaggaattcagtgtttctgcaaatgaacagcctgagagtcgaagacacgggtatttatttctgtgcaagagatagcgaattccgccaatggtttggggagttgccgcacccattggaatactggggccggggaatccgagtcaccgtctccgcagcctccaccaagggcccatcggtcttccccctggcaccctcctccaagagcacctctgggggcacagcggccctgggctgcctggtcaaggactacttccccgaaccggtgacggtgtcgtggaactcaggcgccctgaccagcggcgtgcacaccttcccggctgtcctacagtcctcagga

SEQ ID NO: 336 - DNA, 733 bp, Artificial Sequence
  Synthetic construct
tggggacccaaaaaccacacccctccttgggagaatcccctagatcacagctcctcaccatggactggacctggaccatccttttcttggtggcagcagcaacaggtgcccactcccaggttcaactcgtccagtcaggaagtgaagtgaagaagcctggggcctcagtgaaggtctcctgcaaggcttctggctacgccttcaccaattatggtatcacatggctgcgacaggcccctggacaacggcctgagtggatgggatggattagcgcttacaacggaaaaacagattttgcacagaagttcaagggcagactcaccatgaccacagacacatcaacgagcacagcctacatggagctgaggactctgagatctgacgacacggccgtctactactgtgcgcgccgccatttctatgatggtggtgatttttacttagtcgaatcttattactttgactattggggccagggaaccctggtcaccgtgtcctcagcctccaccaagggcccatcggtcttccccctggcgccctgctccaggagcacctccgagagcacagcggccctgggctgcctggtcaaggactacttccccgaaccggtgacggtgtcgtggaactcaggcgccctgaccagcggcgtgcacaccttcccggctgtcctacagtcctcaggactctactccctcagcagcgtggtgaccgtgccctccagcagcttgggcac

SEQ ID NO: 337 - DNA, 696 bp, Artificial Sequence
  Synthetic construct
gggctcagggaggtgccttagccctggattccaaggcatttccacttggtgatcagcactgaacacagaggactcaccatggagttggggctgtactgggttttccttgttgctcttttagaaggtgtccagtgtgaggtgcagttgctggagtcggggggaggcttggtacagcctggggggtccctgagactctcctgtgcagcctctggattttccttcaacatctatagcatgaattgggtccgccaggctccagagaaggggctggagtggatttcatacattagcagtactggcaccaacatattctacgcagactctgtgaggggccgattcaccatctctagagacaatggcaggaattcagtgtttctgcaaatgaacagcctgagagtcgaagacacgggtatttatttctgtgcaagagatagcgaattccgccaatggtttggggagttgccgcacccattggaatactggggccggggaatccgagtcaccgtctccgcagcctccaccaagggcccatcggtcttccccctggcaccctcctccaagagcacctctgggggcacagcggccctgggctgcctggtcaaggactacttccccgaaccggtgacggtgtcgtggaactcaggcgccctgaccagcggcgtgcacaccttcccggctgtcctacagtcctcagga

SEQ ID NO: 338 - DNA, 776 bp, Artificial Sequence
  Synthetic construct
gggggattccaaggcatttccacttggtgatcagcactgaacacagaggactcaccatggagttggggctgtactgggttttccttgttgctcttttagaaggtgtccagtgtgaggtgcagttgctggagtcggggggaggcttggtacagcctggggggtccctgagactctcctgtgcagcctctggattttccttcaacatctatagcatgaattgggtccgccaggctccagagaaggggctggagtggatttcatacattagcagtactggcaccaacatattctacgcagactctgtgaggggccgattcaccatctctagagacaatggcaggaattcagtgtttctgcaaatgaacagcctgagagtcgaagacacgggtatttatttctgtgcaagagatagcgaattccgccaatggtttggggagttgccgcacccattggaatactggggccggggaatccgagtcaccgtctccgcagcctccaccaagggcccatcggtcttccccctggcaccctcctccaagagcacctctgggggcacagcggccctgggctgcctggtcaaggactacttccccgaaccggtgacggtgtcgtggaactcaggcgccctgaccagcggcgtgcacaccttcccggctgtcctacagtcctcaggactctactccctcagcagcgtggtgaccgtgccctccagcagcttgggcacccagacctacatctgcaacgtgaatcacaagcccagcaacaccaaggtggac

SEQ ID NO: 339 - DNA, 739 bp, Artificial Sequence
  Synthetic construct
ggggagttctcagggaggtgccttagccctggattccaaggcatttccacttggtgatcagcactgaacacagaggactcaccatggagttggggctgtactgggttttccttgttgctcttttagaaggtgtccagtgtgaggtgcagttgctggagtcggggggaggcttggtacagcctggggggtccctgagactctcctgtgcagcctctggattttccttcaacatctatagcatgaattgggtccgccaggctccagagaaggggctggagtggatttcatacattagcagtactggcaccaacatattctacgcagactctgtgaggggccgattcaccatctctagagacaatggcaggaattcagtgtttctgcaaatgaacagcctgagagtcgaagacacgggtatttatttctgtgcaagagatagcgaattccgccaatggtttggggagttgccgcacccattggaatactggggccggggaatccgagtcaccgtctccgcagcctccaccaagggcccatcggtcttccccctggcaccctcctccaagagcacctctgggggcacagcggccctgggctgcctggtcaaggactacttccccgaaccggtgacggtgtcgtggaactcaggcgccctgaccagcggcgtgcacaccttcccggctgtcctacagtcctcaggactctactccctcagcagcgtggtgaccgtgccctccag

SEQ ID NO: 340 - DNA, 805 bp, Artificial Sequence
  Synthetic construct
ggggagttctcagggaggtgccttagccctggattccaaggcatttccacttggtgatcagcactgaacacagaggactcaccatggagttggggctgtactgggttttccttgttgctcttttagaaggtgtccagtgtgaggtgcagttgctggagtcggggggaggcttggtacagcctggggggtccctgagactctcctgtgcagcctctggattttccttcaacatctatagcatgaattgggtccgccaggctccagagaaggggctggagtggatttcatacattagcagtactggcaccaacatattctacgcagactctgtgaggggccgattcaccatctctagagacaatggcaggaattcagtgtttctgcaaatgaacagcctgagagtcgaagacacgggtatttatttctgtgcaagagatagcgaattccgccaatggtttggggagttgccgcacccattggaatactggggccggggaatccgagtcaccgtctccgcagcctccaccaagggcccatcggtcttccccctggcaccctcctccaagagcacctctgggggcacagcggccctgggctgcctggtcaaggactacttccccgaaccggtgacggtgtcgtggaactcaggcgccctgaccagcggcgtgcacaccttcccggctgtcctacagtcctcaggactctactccctcagcagcgtggtgaccgtgccctccagcagcttgggcacccagacctacatctgcaacgtgaatcacaagcccagcaacaccaaggtggacaa

SEQ ID NO: 341 - DNA, 730 bp, Artificial Sequence
  Synthetic construct
gactgatgaaaaccaacccaaccctgaccctgcagttctcagggaggtgccttagccctggattccaaggcatttccacttggtgatcagcactgaacacagaggactcaccatggagttggggctgtactgggttttccttgttgctcttttagaaggtgtccagtgtgaggtgcagttgctggagtcggggggaggcttggtacagcctggggggtccctgagactctcctgtgcagcctctggattttccttcaacatctatagcatgaattgggtccgccaggctccagagaaggggctggagtggatttcatacattagcagtactggcaccaacatattctacgcagactctgtgaggggccgattcaccatctctagagacaatggcaggaattcagtgtttctgcaaatgaacagcctgagagtcgaagacacgggtatttatttctgtgtaagagatagcgaattccgccaatggtttggggagttgccgcacccattggaatactggggccggggaatccgagtcaccgtctccgcagcctccaccaagggcccatcggtcttccccctggcaccctcctccaagagcacctctgggggcacagcggccctgggctgcctggtcaaggactacttccccgaaccggtgacggtgtcgtggaactcaggcgccctgaccagcggcgtgcacaccttcccggctgtcctacagtcctcagga

SEQ ID NO: 342 - DNA, 706 bp, Artificial Sequence
  Synthetic construct
gatatggggagttctcagggaggtgccttagccctggattccaaggcatttccacttggtgatcagcactgaacacagaggactcaccatggagttggggctgtactgggttttccttgttgctcttttagaaggtgtccagtgtgaggtgcagttgctggagtcggggggaggcttggtacagcctggggggtccctgagactctcctgtgcagcctctggattttccttcaacatctatagcatgaattgggtccgccaggctccagagaaggggctggagtggatttcatacattagcagtactggcaccaacatattctacgcagactctgtgaggggccgattcaccatctctagagacaatggcaggaattcagtgtttctgcaaatgaacagcctgagagtcgaagacacgggtatttatttctgtgcaagagatagcgaattccgccaatggtttggggagttgccgcacccattggaatactggggccggggaatccgagtcaccgtctccgcagcctccaccaagggcccatcggtcttccccctggcaccctcctccaagagcacctctgggggcacagcggccctgggctgcctggtcaaggactacttccccgaaccggtgacggtgtcgtggaactcaggcgccctgaccagcggcgtgcacaccttcccggctgtcctacagtcctcagga

SEQ ID NO: 343 - DNA, 738 bp, Artificial Sequence
  Synthetic construct
gggggttctcagggaggtgccttagccctggattccaaggcatttccacttggtgatcagcactgaacacagaggactcaccatggagttggggctgtactgggttttccttgttgctcttttagaaggtgtccagtgtgaggtgcagttgctggagtcggggggaggcttggtacagcctggggggtccctgagactctcctgtgcagcctctggattttccttcaacatctatagcatgaattgggtccgccaggctccagagaaggggctggagtggatttcatacattagcagtactggcaccaacatattctacgcagactctgtgaggggccgattcaccatctctagagacaatggcaggaattcagtgtttctgcaaatgaacagcctgagagtcgaagacacgggtatttatttctgtgcaagagatagcgaattccgccaatggtttggggagttgccgcacccattggaatactggggccggggaatccgagtcaccgtctccgcagcctccaccaagggcccatcggtcttccccctggcaccctcctccaagagcacctctgggggcacagcggccctgggctgcctggtcaaggactacttccccgaaccggtgacggtgtcgtggaactcaggcgccctgaccagcggcgtgcacaccttcccggctgtcctacagtcctcaggactctactccctcagcagcgtggtgaccgtgccctccag

SEQ ID NO: 344 - DNA, 806 bp, Artificial Sequence
  Synthetic construct
ggggcagttctcagggaggtgccttagccctggattccaaggcatttccacttggtgatcagcactgaacacagaggactcaccatggagttggggctgtactgggttttccttgttgctcttttagaaggtgtccagtgtgaggtgcagttgctggagtcggggggaggcttggtacagcctggggggtccctgagactctcctgtgcagcctctggattttccttcaacatctatagcatgaattgggtccgccaggctccagagaaggggctggagtggatttcatacattagcagtactggcaccaacatattctacgcagactctgtgaggggccgattcaccatctctagagacaatggcaggaattcagtgtttctgcaaatgaacagcctgagagtcgaagacacgggtatttatttctgtgcaagagatagcgaattccgccaatggtttggggagttgccgcacccattggaatactggggccggggaatccgagtcaccgtctccgcagcctccaccaagggcccatcggtcttccccctggcaccctcctccaagagcacctctgggggcacagcggccctgggctgcctggtcaaggactacttccccgaaccggtgacggtgtcgtggaactcaggcgccctgaccagcggcgtgcacaccttcccggctgtcctacagtcctcaggactctactccctcagcagcgtggtgaccgtgccctccagcagcttgggcacccagacctacatctgcaacgtgaatcacaagcccagcaacaccaaggtggacaa

SEQ ID NO: 345 - DNA, 774 bp, Artificial Sequence
  Synthetic construct
gggatactactttctgagagtcctggacctcccgtgcaggaacatgagacatctgtgtttcttcctcctcctggtggcagctcccagatggggcctgtcccaggtgcaactgcaggagtcgggccccggactcctgaagccttcacagaccctgtccctcacctgcactgtctctggcggctccatcatgacaggaacttactactggacctggatgcggcagcccgccgggaaggctctggagtggattggccatatctatctcagtgggaccaccaactacaacccctccctcgagagtcgagtcaccatgtcagtagacacgtccaagaatcagttctccctgagtctgaattctgtgaccgccacggacacgggcatctattactgtgcgcgggctttctactatgatagaagtggtaatctaagaaatggggcgcgttacttcgacccctggggccagggaagcctggtcaccgtctcctcagcctccaccaagggcccatcggtcttccccctggcgccctgctccaggagcacctctgggggcacagcggccctgggctgcctggtcaaggactacttccccgaaccggtgacggtgtcgtggaactcaggcgccctgaccagcggcgtgcacaccttcccggctgtcctacagtcctcaggactctactccctcagcagcgtggtgaccgtgccctccagcagcttgggcacccagacctacacctgcaacgtgaatcacaagcccagcaacaccaaggtggacaa

SEQ ID NO: 346 - DNA, 682 bp, Artificial Sequence
  Synthetic construct
gggggcatcacataaccaccacattcctcctctgaagaagcccctgggagcacagctcgtcaccatggactggacctggaggttcctctttgtggtggcagcagctacaggtgtccagtcccaggtccagctggtgcagtctgggactgaggtgaagaaggttgggtcctcagtgaaggtctcctgcaaggcttctggaggcagcttcggcagccgttctatcaactgggtgcgacaggcccctggacaaggacttgagtggatgggcaggatcaaccctatctttggtacagcagactacgcacagacattccagggcagactcatgattaaagtggacgcatcaacgaactcagcctacatggaactgagcggcctgagatctgacgacacggccatttattattgtgcgacagaaagggggatggttcaagtcgcccatgcgggtgggggctattttgacttctggggccagggaaccctggtcaccgtctcctcagcctccaccaagggcccatcggtcttccccctggcaccctcctccaagagcacctctgggggcacagcggccctgggctgcctggtcaaggactacttccccgaaccggtgacggtgtcgtggaactcaggcgccctgaccagcggcgtgcacaccttcccggctgtcctacagtcctcagga

SEQ ID NO: 347 - DNA, 683 bp, Artificial Sequence
  Synthetic construct
ggggagcatcacataaccaccacattcctcctctgaagaagcccctgggagcacagctcgtcaccatggactggacctggaggttcctctttgtggtggcagcagctacaggtgtccagtcccaggtccagctggtgcagtctgggactgaggtgaagaaggttgggtcctcagtgaaggtctcctgcaaggcttctggaggcagcttcggcagccgttctatcaactgggtgcgacaggcccctggacaaggacttgagtggatgggcaggatcaaccctatctttggtacagcagactacgcacagacattccagggcagactcatgattaaagtggacgcatcaacgaactcagcctacatggaactgagcggcctgagatctgacgacacggccatttattattgtgcgacagaaagggggatggttcaagtcgcccatgcgggtgggggctattttgacttctggggccagggaaccctggtcaccgtctcctcagcctccaccaagggcccatcggtcttccccctggcaccctcctccaagagcacctctgggggcacagcggccctgggctgcctggtcaaggactacttccccgaaccggtgacggtgtcgtggaactcaggcgccctgaccagcggcgtgcacaccttcccggctgtcctacagtcctcagga

SEQ ID NO: 348 - DNA, 655 bp, Artificial Sequence
  Synthetic construct
cggtgatcagcactgaacacagaggactcaccatggaatttgggctgagctgggttttccttgctgctatcatacaaggtgtccagtgccaggtgcagctggtggagtcggggggaggcttggtcaagcctggcgggtccctgagactgtcctgttcaggctctggtttcacgttcggtgactactacatcaactggatccgcctggctccagggaaggggctggaatggctttcatctatgagtgctggtggttctaatgtatattacgcagactctgtgaagggccgattcaccctctccagggacaacgccaagaactcagtgtatctgcaaatgaacagcctgacagccgacgacacggccgtgtatttctgtgcgagagatggtttatcaggtggtcaacctctacttcgatttatcccaaacggaatggacgtctggggccaagggaccacggtcaccgtctcttcagcctccaccaagggcccatcggtcttccccctggcaccctcctccaagagcacctctgggggcacagcggccctgggctgcctggtcaaggactacttccccgaaccggtgacggtgtcgtggaactcaggcgccctgaccagcggcgtgcacaccttcccggctgtcctacagtcctcagg

SEQ ID NO: 349 - DNA, 812 bp, Artificial Sequence
  Synthetic construct
ggggagctctgggagaagagtcccagccccagaattcccaggagtttccattcggtgatcagcactgaacacagaggactcaccatggaatttgggctgagctgggttttccttgctgctatcatacaaggtgtccagtgccaggtgcagctggtggagtcggggggaggcttggtcaagcctggcgggtccctgagactgtcctgttcaggctctggtttcacgttcggtgactactacatcaactggatccgcctggctccagggaaggggctggaatggctttcatctatgagtgctggtggttctaatgtatattacgcagactctgtgaagggccgattcaccctctccagggacaacgccaagaactcagtgtatctgcaaatgaacagcctgacagccgacgacacggccgtgtatttctgtgcgagagatggtttatcaggtggtcaacctctacttcgatttatcccaaacggaatggacgtctggggccaagggaccacggtcaccgtctcttcagcctccaccaagggcccatcggtcttccccctggcgccctgctccaggagcacctctgggggcacagcggccctgggctgcctggtcaaggactacttccccgaaccggtgacggtgtcgtggaactcaggcgccctgaccagcggcgtgcacaccttcccggctgtcctacagtcctcaggactctactccctcagcagcgtggtgaccgtgccctccagcagcttgggcacccagacctacacctgcaacgtgaatcacaagcccagcaacaccaaggtggacaa

SEQ ID NO: 350 - DNA, 701 bp, Artificial Sequence
  Synthetic construct
tgtcgtttcttatatggggatcacataaccaccacattcctcctctgaagaagcccctgggagcacagctcatcaccatggactggacctggaggttcctctttgtggtggcagcagctacaggtgtccagtcccaggtccagttggtgcagtccggggctgaagtgaagaagcctgggtcctcagtgaaagtctcctgcaaggcctctggaggcagcttcaatagctatactttcacctggatacgacaggcccctggacaagggcttgagtggatgggaaggatcgtccctacctttggtacaacaaactacgcacagaagttccagggcagactcacgattagtgtcgacgaatccacgagcacagcctacgtggaactcagcggcctgagatctgacgacacggccatatactactgtgcgagcggtccagattgtagtggcgctagttgtttctttcggcggcattactactttgatcgctggggccagggaaccctggtcagcgtctcctcagcctccaccaagggcccatcggtcttccccctggcgccctgctccaggagcacctccgagagcacagcggccctgggctgcctggtcaaggactacttccccgaaccggtgacggtgtcgtggaactcaggcgccctgaccagcggcgtgcacaccttcccggctgtcctacagtcctcagga

SEQ ID NO: 351 - DNA, 683 bp, Artificial Sequence
  Synthetic construct
tggggacccaaaaaccacacccctccttgggagaatcccctagatcacagctcctcaccatggactggacctggagcatccttttcttggtggcagcagcaacaggtgcccactcccaggttcagctggtgcagtctggagctgaggtgaagaagcctggggcctcagtgaaggtcgcctgcaagacttctggttatcgttttaccaactttggtatcacttggatgcgacaggcccctggaggagggcttgagtggatgggatggatcagcgcttacaatggtcaaacacaatatgcacggaagttccagggcagagtcaccatgaccactgatacagccacggccacagcctacctggaattgaggagcctgaagtctgacgacacggccgtgtatttctgtgcgcgccgctatttttatgatacccctggtgacttcctgctcgagacttattattttgattactggggccagggaaccctggtcaccgtctcctcagcctccaccaagggcccatcggtcttccccctggcaccctcctccaagagcacctctgggggcacagcggccctgggctgcctggtcaaggactacttccccgaaccggtgacggtgtcgtggaactcaggcgccctgaccagcggcgtgcacaccttcccggctgtcctacagtcctcagga

SEQ ID NO: 352 - DNA, 682 bp, Artificial Sequence
  Synthetic construct
ggggacccaaaaaccacacccctccttgggagaatcccctagatcacagctcctcaccatggactggacctggagcatccttttcttggtggcagcagcaacaggtgcccactcccaggttcagctggtgcagtctggagctgaggtgaagaagcctggggcctcagtgaaggtcgcctgcaagacttctggttatcgttttaccaactttggtatcacttggatgcgacaggcccctggaggagggcttgagtggatgggatggatcagcgcttacaatggtcaaacacaatatgcacggaagttccagggcagagtcaccatgaccactgatacagccacggccacagcctacctggaattgaggagcctgaagtctgacgacacggccgtgtatttctgtgcgcgccgctatttttatgatacccctggtgacttcctgctcgagacttattattttgattactggggccagggaaccctggtcaccgtctcctcagcctccaccaagggcccatcggtcttccccctggcgccctgctccaggagcacctccgagagcacagcggccctgggctgcctggtcaaggactacttccccgaaccggtgacggtgtcgtggaactcaggcgccctgaccagcggcgtgcacaccttcccggctgtcctacagtcctcagga

SEQ ID NO: 353 - DNA, 684 bp, Artificial Sequence
  Synthetic construct
ctggggacccaaaaaccacacccctccttgggagaatcccctagatcacagctcctcaccatggactggacctggagcatccttttcttggtggcagcagcaacaggtgcccactcccaggttcagctggtgcagtctggagctgaggtgaagaagcctggggcctcagtgaaggtcgcctgcaagacttctggttatcgttttaccaactttggtatcacttggatgcgacaggcccctggaggagggcttgagtggatgggatggatcagcgcttacaatggtcaaacacaatatgcacggaagttccagggcagagtcaccatgaccactgatacagccacggccacagcctacctggaattgaggagcctgaagtctgacgacacggccgtgtatttctgtgcgcgccgctatttttatgatacccctggtgacttcctgctcgagacttattattttgattactggggccagggaaccctggtcaccgtctcctcagcctccaccaagggcccatcggtcttccccctggcaccctcctccaagagcacctctgggggcacagcggccctgggctgcctggtcaaggactacttccccgaaccggtgacggtgtcgtggaactcaggcgccctgaccagcggcgtgcacaccttcccggctgtcctacagtcctcagga

SEQ ID NO: 354 - DNA, 680 bp, Artificial Sequence
  Synthetic construct
gggacccaaaaaccacacccctccttgggagaatccctagatcacagctcctcaccatggactggacctggagcatccttttcttggtggcagcagcaacaggtgcccactcccaggttcagctggtgcagtctggagctgaggtgaagaagcctggggcctcagtgaaggtcgcctgcaagacttctggttatcgttttaccaactttggtatcacttggatgcgacaggcccctggaggagggcttgagtggatgggatggatcagcgcttacaatggtcaaacacaatatgcacggaagttccagggcagagtcaccatgaccactgatacagccacggccacagcctacctggaattgaggagcctgaagtctgacgacacggccgtgtatttctgtgcgcgccgctatttttatgatacccctggtgacttcctgctcgagacttattattttgattactggggccagggaaccctggtcaccgtctcctcagcctccaccaagggcccatcggtcttccccctggcaccctcctccaagagcacctctgggggcacagcggccctgggctgcctggtcaaggactacttccccgaaccggtgacggtgtcgtggaactcaggcgccctgaccagcggcgtgcacaccttcccggctgtcctacagtcctcagga

SEQ ID NO: 355 - DNA, 787 bp, Artificial Sequence
  Synthetic construct
gatcacataaccaccacattcctcctctgaagaagcccctgggagcacagctcatcaccatggactggacctggaggttcctctttgtggtggcagcagctacaggtgtccagtcccaggtccagttggtgcagtccggggctgaagtgaagaagcctgggtcctcagtgaaagtctcctgcaaggcctctggaggcagcttcaatagctatactttcacctggatacgacaggcccctggacaagggcttgagtggatgggaaggatcgtccctacctttggtacaacaaactacgcacagaagttccagggcagactcacgattagtgtcgacgaatccacgagcacagcctacgtggaactcagcggcctgagatctgacgacacggccatatactactgtgcgagcggtccagattgtagtggcgctagttgtttctttcggcggcattactactttgatcgctggggccagggaaccctggtcagcgtctcctcagcctccaccaagggcccatcggtcttccccctggcgccctgctccaggagcacctccgagagcacagcggccctgggctgcctggtcaaggactacttccccgaaccggtgacggtgtcgtggaactcaggcgccctgaccagcggcgtgcacaccttcccggctgtcctacagtcctcaggactctattccctcagcagcgtggtgaccgtgccctccagcaacttcggcacccagacctacacctgcaacgtagatcacaagcccagcaacaccaaggtggacaa

SEQ ID NO: 356 - DNA, 789 bp, Artificial Sequence
  Synthetic construct
ccttagccctggattccaaggcatttccacttggtgatcagcactgaacacagaggactcaccatggaatttgggctgagctgggttttccttgctgctatcatacaaggtgtccagtgccaggtgcagctggtggagtcggggggaggcttggtcaagcctggcgggtccctgagactgtcctgtgcaggctctggtttcacattcagtgactactacatcaactggatccgcctggctccagggaaggggctggaatggctttcatctatgagtgctggtggttctaatgtgcattacgcagactctgtgaagggccgattcaccatctccagggacaacgccaagaactcagtgtatctgcaaatgaacagcctgacagccgaagacacggccgtgtatttctgtgcgagagatggtttatcaggtggtcaacctctacttcgattcatcccaaacggaatggacgtctggggccaagggaccacggtcaccgtctcttcagcctccaccaagggcccatcggtcttccccctggcaccctcctccaagagcacctctgggggcacagcggccctgggctgcctggtcaaggactacttccccgaaccggtgacggtgtcgtggaactcaggcgccctgaccagcggcgtgcacaccttcccggctgtcctacagtcctcaggactctactccctcagcagcgtggtgaccgtgccctccagcagcttgggcacccagacctacatctgcaacgtgaatcacaagcccagcaacaccaaggtggac

SEQ ID NO: 357 - DNA, 706 bp, Artificial Sequence
  Synthetic construct
tggggagctctgggagaagagccccagccccagaattcccaggagtttccattcggtgatcagcactgaacacagaggactcaccatggagtttgggctgagctgggttttccttgttgctattataaaaggtgtccactgtcaggtgttactggtggagtcggggggagacgtggtcaagcctggaggatccctgagactctcctgtgcaggctctggattcagcttcactgactactccatgacctggatccgccaggccccagggaaggggctggagtggatttcatctattgatagtagtgccactaacatatactacgcagactctgtgaagggccgattcaccgtctccagggacaacgccaaaaactcactgtatctgcaaatgaacagcctcatagccgaggacacggccatatattactgtgcgagaaaggcggggagggttttttggagtgcttattcgatggaatactactttgattactggggccagggaaggctggtcaccgtctcctcagcctccaccaagggcccatcggtcttccccctggcaccctcctccaagagcacctctgggggcacagcggccctgggctgcctggtcaaggactacttccccgaaccggtgacggtgtcgtggaactcaggcgccctgaccagcggcgtgcacaccttcccggctgtcctacagtcctcagga

SEQ ID NO: 358 - DNA, 780 bp, Artificial Sequence
  Synthetic construct
gggggagaggagcccagcactagaagtcggcggtgtttccattcggtgatcatcactgaacacagaggactcaccatggagtttgggctgagctgggttttcctcgttgctcttttaagaggtgcccagtgtcaagtgcagctggtggagtcagggggaggcgtggtcccgccgggggggtccctgagactgtcctgtgaaacgtctggattcatcttcagtgtctatgccatgcactgggtccgccaggctccaggcaaggggctggagtgggtggcatctatgcggtctgatggaagtaaggacttctatgcagactccgtgaagggccggttctccatctccagagacaattccaagaacatgttgtatttacaaatgaacagcctgagaagtggggacacggctgtctattactgtgcgaaggatagggctgttccatacttctactacatggacgtctggggcaaagggaccacggtcatcgtctcttccgcctccaccaagggcccatcggtcttccccctggcaccctcctccaagagcacctctgggggcacagcggccctgggctgcctggtcaaggactacttccccgaaccggtgacggtgtcgtggaactcaggcgccctgaccagcggcgtgcacaccttcccggctgtcctacagtcctcaggactctactccctcagcagcgtggtgaccgtgccctccagcagcttgggcacccagacctacacctgcaacgtgaatcacaagcccagcaacaccaaggtggac

SEQ ID NO: 359 - DNA, 812 bp, Artificial Sequence
  Synthetic construct
ggggagctctgggagaagagtcccagccccagaattcccaggagtttccattcggtgatcagcactgaacacagaggactcaccatggaatttgggctgagctgggttttccttgctgctatcatacaaggtgtccagtgccaggtgcagctggtggagtcggggggaggcttggtcaagcctggcgggtccctgagactgtcctgtgcaggctctggtttcacattcagtgactactacatcaactggatccgcctggccccagggaaggggctggaatggctttcatctatgagtgctggtggttctaatgaatattacgcagactctgtgaagggccgattcaccatctccagggacaacgccaagaactcagtgtatctgcaaatgaacagcctgacagccgaggacacggccgtgtatttctgtgcgagagatggtttatcaggtggtcaacctctacttcgatttatcccaaacggaatggacgtctggggccaagggaccacagtcaccgtctcttcagcctccaccaagggcccatcggtcttccccctggcgccctgctccaggagcacctccgagagcacagcggccctgggctgcctggtcaaggactacttccccgaaccggtgacggtgtcgtggaactcaggcgccctgaccagcggcgtgcacaccttcccggctgtcctacagtcctcaggactctattccctcagcagcgtggtgaccgtgccctccagcaacttcggcacccagacctacacctgcaacgtagatcacaagcccagcaacaccaaggtggacaa

SEQ ID NO: 360 - DNA, 705 bp, Artificial Sequence
  Synthetic construct
ggggagctctgggagaagagccccagccccagaattcccaggagtttccattcggtgatcagcactgaacacagaggactcaccatggagtttgggctgagctgggttttccttgttgctattataaaaggtgtccactgtcaggtgttactggtggagtcggggggagacgtggtcaagcctggaggatccctgagactctcctgtgcaggctctggattcagcttcactgactactccatgacctggatccgccaggccccagggaaggggctggagtggatttcatctattgatagtagtgccactaacatatactacgcagactctgtgaagggccgattcaccgtctccagggacaacgccaaaaactcactgtatctgcaaatgaacagcctcatagccgaggacacggccatatattactgtgcgagaaaggcggggagggttttttggagtgcttattcgatggaatactactttgattactggggccagggaaggctggtcaccgtctcctcagcctccaccaagggcccatcggtcttccccctggcaccctcctccaagagcacctctgggggcacagcggccctgggctgcctggtcaaggactacttccccgaaccggtgacggtgtcgtggaactcaggcgccctgaccagcggcgtgcacaccttcccggctgtcctacagtcctcagga

SEQ ID NO: 361 - DNA, 707 bp, Artificial Sequence
  Synthetic construct
ctggggagctctgggagaagagccccagccccagaattcccaggagtttccattcggtgatcagcactgaacacagaggactcaccatggagtttgggctgagctgggttttccttgttgctattataaaaggtgtccactgtcaggtgttactggtggagtcggggggagacgtggtcaagcctggaggatccctgagactctcctgtgcaggctctggattcagcttcactgactactccatgacctggatccgccaggccccagggaaggggctggagtggatttcatctattgatagtagtgccactaacatatactacgcagactctgtgaagggccgattcaccgtctccagggacaacgccaaaaactcactgtatctgcaaatgaacagcctcatagccgaggacacggccatatattactgtgcgagaaaggcggggagggttttttggagtgcttattcgatggaatactactttgattactggggccagggaaggctggtcaccgtctcctcagcctccaccaagggcccatcggtcttccccctggcaccctcctccaagagcacctctgggggcacagcggccctgggctgcctggtcaaggactacttccccgaaccggtgacggtgtcgtggaactcaggcgccctgaccagcggcgtgcacaccttcccggctgtcctacagtcctcagga

SEQ ID NO: 362 - DNA, 784 bp, Artificial Sequence
  Synthetic construct
ggggacccaaaatccacacccctccttgggagaatcccctagatcacagctcctcaccatggactggacctggagcatctttttcttggtggcagcatcaacaggtggccactcccagattcaactggtacagtctggaaatgaggtgaagaagcccggggcctcagtgaaggtctcctgcaaggcctctggctacatttttacccactttggtatcacttggctgcgacaggcccctggacaaaggcttgagtggatggggtggatcagtgcatataatggcaacacaaactatgcacagaagttccggggcagagtcaccatgaccacagacacatccacgaacacagcctacatggagctgcggaccctgagatctgacgacacggccgtctattactgtgcgcgccgccactattatgatactgatagtgattacgtactcgactcttattactttgacttttggggccagggaaccctggtcaccgtctcctcagcctccaccaagggcccatcggtcttccccctggcgccctgctccaggagcacctccgagagcacagcggccctgggctgcctggtcaaggactacttccccgaaccggtgacggtgtcgtggaactcaggcgccctgaccagcggcgtgcacaccttcccggctgtcctacagtcctcaggactctactccctcagcagcgtggtgaccgtgccctccagcagcttgggcacccagacctacatctgcaacgtgaatcacaagccagcaacaccaaggtggaca

SEQ ID NO: 363 - DNA, 705 bp, Artificial Sequence
  Synthetic construct
ggggagctctgggagaagagccccagccccagaattcccaggagtttccattcggtgatcagcactgaacacagaggactcaccatggagtttgggctgagctgggttttccttgttgctattataaaaggtgtccactgtcaggtgttactggtggagtcggggggagacgtggtcaagcctggaggatccctgagactctcctgtgcaggctctggattcagcttcactgactactccatgacctggatccgccaggccccagggaaggggctggagtggatttcatctattgatagtagtgccactaacatatactacgcagactctgtgaagggccgattcaccgtctccagggacaacgccaaaaactcactgtatctgcaaatgaacagcctcatagccgaggacacggccatatattactgtgcgagaaaggcggggagggttttttggagtgcttattcgatggaatactactttgattactggggccagggaaggctggtcaccgtctcctcagcctccaccaagggcccatcggtcttccccctggcgccctgctccaggagcacctccgagagcacagcggccctgggctgcctggtcaaggactacttccccgaaccggtgacggtgtcgtggaactcaggcgccctgaccagcggcgtgcacaccttcccggctgtcctacagtcctcagga

SEQ ID NO: 364 - DNA, 770 bp, Artificial Sequence
  Synthetic construct
gataagggaaatgctttctgagagtcatggatctcatgtgcaagaaaatgaagcacctgtggttcttcctcctgctggtggcggctcccagaggcgtcctgtcgcagctgcagctgcaggagtcgggcccaggactggtgaagccttcggagaccctgtccctcacctgcactgtctctggtggctccatcaatacttctaaatactactgggcctggattcgccagtccccagggaaggggctggaatgccttgggagtatcttctatagtgggagcacatacgacagcccgtccctcaagagtcgagtcacattttccgttgacacgtccaagaaccagttctccctgaaactgaccgctgtgaccgccgcagactcggctatgtatttctgtgcgagactccaccattacgatttttggagtggcggtggacattattactttgactattggggccagggaatcctggtcaccgtctcctcagcctccaccaagggcccatcggtcttccccctggcaccctcctccaagagcacctctgggggcacagcggccctgggctgcctggtcaaggactacttccccgaaccggtgacggtgtcgtggaactcaggcgccctgaccagcggcgtgcacaccttcccggctgtcctacagtcctcaggactctactccctcagcagcgtggtgaccgtgccctccagcagcttgggcacccagacctacatctgcaacgtgaatcacaagcccagcaacaccaaggtggac

SEQ ID NO: 365 - DNA, 766 bp, Artificial Sequence
  Synthetic construct
tggggatgctttctgagagtcatggatctcatgtgcaagaaaatgaagcacctgtggttcttcctcctgctggtggcggctcccagaggcgtcctgtcgcagctgcagctgcaggagtcgggcccaggactggtgaagccttcggagaccctgtccctcacctgcactgtctctggtggctccatcaatacttctaaatactactgggcctggattcgccagtccccagggaaggggctggaatgccttgggagtatcttctatagtgggagcacatacgacagcccgtccctcaagagtcgagtcacattttccgttgacacgtccaagaaccagttctccctgaaactgaccgctgtgaccgccgcagactcggctatgtatttctgtgcgagactccaccattacgatttttggagtggcggtggacattattactttgactattggggccagggaatcctggtcaccgtctcctcagcctccaccaagggcccatcggtcttccccctggcaccctcctccaagagcacctctgggggcacagcggccctgggctgcctggtcaaggactacttccccgaaccggtgacggtgtcgtggaactcaggcgccctgaccagcggcgtgcacaccttcccggctgtcctacagtcctcaggactctactccctcagcagcgtggtgaccgtgccctccagcagcttgggcacccagacctacatctgcaacgtgaatcacaagcccagcaacaccaaggtggaca

SEQ ID NO: 366 - DNA, 696 bp, Artificial Sequence
  Synthetic construct
ggggacatttccttaaattcagggtcctgctcacatgggcaatacgttctgagagtcctggacctcctgtgcaagaacatgaaacacctgtggttcttcctcctgctggtggcagctcccagatgggtcctgtcccaggtgcagctgcaggagtcgggcccaggactggtgaagccttcacagactctgtccctcacctgcactgtctctggtgcctccatcaacagtgatgatttctactggacctggatccgccagtccccagggaagggcctggagtggattgggtacgtctatgacagtggaaatacgtactacaacccgtccctcaagagtcgagctaccatatcacttgaggcgtcgcacaatcagttctccctgaagttgacctctgtgactgccgcagacacggccgtttattattgtgccagagaaaaggttgtaactatgatacttgtggcagctgcgtatttcgacccctggggccagggaattctggtcaccgtctcctcagcctccaccaagggcccatcggtcttccccctggcaccctcctccaagagcacctctgggggcacagcggccctgggctgcctggtcaaggactacttccccgaaccggtgacggtgtcgtggaactcaggcgccctgaccagcggcgtgcacaccttcccggctgtcctacagtcctcagga

SEQ ID NO: 367 - DNA, 684 bp, Artificial Sequence
  Synthetic construct
gggggagcatcacataacaaccagattcctcctctaaagaagcccctgggagcacagctcatcaccatggactggacctggaggttcctctttgtggtggcagcagctacaggtgtccagtcccaggtccacctggtgcagtctggggctgaggtgaagaagcctgggtcctcagtgaaggtctcatgcaaggcttctggaggcaccttcgccacctatgctatcagttgggtgcggcaggcccctggactagggcttcagtggatgggaggcatcattcctatctttgaaacaacagagtacgaacagaatttccagggcagactcacaatttccacggacgagtccacgaccacagcctacatggaactgagcagcctgagatctgaggacacggccgtctattactgtgcgacagtgactctcgaggggcagccctgggggaactactactactacatggaagtctggggccaagggaccacggtcatcgtctcttcagcctccaccaagggcccatcggtcttccccctggcaccctcctccaagagcacctctgggggcacagcggccctgggctgcctggtcaaggactacttccccgaaccggtgacggtgtcgtggaactcaggcgccctgaccagcggcgtgcacaccttcccggctgtcctacagtcctcagga

SEQ ID NO: 368 - DNA, 688 bp, Artificial Sequence
  Synthetic construct
ggggacagtgagtctccctcactgtccagctgggatctcagggcttcattttctgtcctcccccatcatggggtcaaccgccatcctcgccctcctcctggctgttctccaaggagtctgtgccgaggtgaagctggagcagtctggagcagaggtgaaaaaggccggggagtctctgaaaatttcctgtaagggttctggatacacttttggcatctattggatcgcctgggtgcgccagaagcccgggaaaggcctggagtggatgggcatcatctatcctgatgactctgaaaccacatacagcccgtcgttccaaggccaggtcaccatctcagccgacaattccaacagaatcgcctacctgcagtggagcagcctgaaggtctcggacaccgccacatactactgtgcgcgacagggggaagattgtagtgatggaagctgccgctccgatcccggtttggacgcctggggccaagggaccacggtcatcgtctccccagcctccaccaagggcccatcggtcttccccctggcaccctcctccaagagcacctctgggggcacagcggccctgggctgcctggtcaaggactacttccccgaaccggtgacggtgtcgtggaactcaggcgccctgaccagcggcgtgcacaccttcccggctgtcctacagtcctcagga

SEQ ID NO: 369 - DNA, 709 bp, Artificial Sequence
  Synthetic construct
tggggagctctgggagaagagtcccagccccagaattcccaggagtttccattcggtgatgagcactgaacacagaggactcaccatggaatttgggctgagctgggttttccttgctgctatcatacaaggtgtccagtgccaggtgaagctggtggagtcggggggaggcttggtcaagcctggcgggtccctgagactgtcctgtgcaggctctggtttcaccttcagtgactactacatcaactggatccgcctggctccagggaaggggctggaatggctttcatccatgagtgctggtggttctaatatgttttacgcagactctgtgaagggccgattcaccatctccagggacaacgccaagaactcagtgtatctgcaaatgaacagcctgacagccgaggacacggccgtgtatttctgtgcgagagatggtttatcaggtggtcaacctctacttcggtttatcccaaacggaatggacgtctggggccaagggaccacggtcaccgtctcctcagcctccaccaagggcccatcggtcttccccctggcaccctcctccaagagcacctctgggggcacagcggccctgggctgcctggtcaaggactacttccccgaaccggtgacggtgtcgtggaactcaggcgccctgaccagcggcgtgcacaccttcccggctgtcctacagtcctcagga

SEQ ID NO: 370 - DNA, 676 bp, Artificial Sequence
  Synthetic construct
ggggaaagcatcatccaacaaccacatcccttctctacagaagcctctgagaggaaagttcttcaccatggactggacctggagggtcttctgcttgctggctgtagctccaggtgctcactcccaggtggttctggtgcagtctggggctgaggtgaagaagcctggggcctcagtgaaggtttcctgcaaggcgtcgggatacgccttcagcacatattatataaattgggtgcgacaggcccctggacaagggcttgagtggatgggaataatcaaccctactggtggtagcacaacctacgcacagaagttccagggcagactcatgatgaccagggacacgtccacaaacacagtcttcatggaaatgagcagcctgaaatctgaggacacggccgtttattattgtgcgagattatggggcccgggaaatcgtgcaatgcctccgggggactggggccagggaaccctggtcagcgtctcctcagcctccaccaagggcccatcggtcttccccctggcaccctcctccaagagcacctctgggggcacagcggccctgggctgcctggtcaaggactacttccccgaaccggtgacggtgtcgtggaactcaggcgccctgaccagcggcgtgcacaccttcccggctgtcctacagtcctcaggactc

SEQ ID NO: 371 - DNA, 811 bp, Artificial Sequence
  Synthetic construct
gggggggagacgagcccagcactggaagtcgccggtgtttccattcggtgatcatcactgaacacagaggactcaccatggagtttgggctgagctgggttttcctcgttgctcttttaagaggtgtccagtgtcaggtgcaactggtggagtctgggggaggcgtggtccagcctgggaggtccctgagactctcttgtacaggctctggattcagcttcaatgcccacgctattcactgggtccgccaggctccaggcaaggggctgcagtgggtggctattatatcatttgatggaaacaagaacaacttcgcagagtccgtgaagggccgattcaccatctccagagacaattccaagaacacagtgtatctgcaaatgaacagcctgagacctgaggacacggctgtgtatttctgtgcgagagatgccacttccaagtaccagccggcattttttcttcatcgcggatcggactacatggacgtctggggcaaagggaccacggtcatcgtttcctcagcctccaccaagggcccatcggtcttccccctggcgccctgctccaggagcacctccgagagcacagcggccctgggctgcctggtcaaggactacttccccgaaccggtgacggtgtcgtggaactcaggcgccctgaccagcggcgtgcacaccttcccggctgtcctacagtcctcaggactctactccctcagcagcgtggtgaccgtgccctccagcaacttcggcacccagacctacacctgcaacgtagatcacaagcccagcaacaccaaggtggacaa

SEQ ID NO: 372 - DNA, 679 bp, Artificial Sequence
  Synthetic construct
gacccaaaaaccacacccctccttgggagaatcccctagatcacagctcctcaccatggactggacctggagcatccttttcttggtggcagcagcaacaggtgcccactcccaggttcagctggtgcagtctggagctgaggtgaagaagcctggggcctcagtgaaggtgtcctgcaaatgttctggttatatctttaccaattatggtatcagctgggtgcgacaggcccctggacaaggacttgagtggatgggatggatcagcgcttacaatgctaaaaaagactactcacagaaattccagggcagagtcaccatgaccacagacacatccacgactacagcctacatggaactgaggagtctgacacctgccgacacggccgtctattactgtgcgagacgaagctattactatgatgatagtgattacattactaatttatactactttgacacctggggccagggaaccctggtcaccgtctcctcagcctccaccaagggcccatcggtcttccccctggcaccctcctccaagagcacctctgggggcacagcggccctgggctgcctggtcaaggactacttccccgaaccggtgacggtgtcgtggaactcaggcgccctgaccagcggcgtgcacaccttcccggctgtcctacagtcctcagga

SEQ ID NO: 373 - DNA, 687 bp, Artificial Sequence
  Synthetic construct
atctgggggagtctccctcactgtccagctgggatctcagggcttcattttctgtcctcccccatcatggggtcaaccgccatcctcgccctcctcctggctgttctccaaggagtctgtgccgaggtgaagctggagcagtctggagcagaggtgaaaaaggccggggagtctctgaagatttcctgtaagggttctggatacacttttggcatctattggatcgcctgggtgcgccagaagcccgggaaaggcctggagtggatgggcatcatctatcctgatgactctgaaaccacatacagcccgtcgttccaaggccaggtcaccatctcagccgacaattccaacagaatcgcctacctgcagtggagcagcctgaaggtctcggacaccgccacatactactgtgcgcgacagggggaagattgtagtgatggaagctgccgctccgatcccggtttggacgcctggggccaagggaccacggtcatcgtctccccagcctccaccaagggcccatcggtcttccccctggcaccctcctccaagagcacctctgggggcacagcggccctgggctgcctggtcaaggactacttccccgaaccggtgacggtgtcgtggaactcaggcgccctgaccagcggcgtgcacaccttcccggctgtcctacagtcctcagga

SEQ ID NO: 374 - DNA, 817 bp, Artificial Sequence
  Synthetic construct
ggggagctctgggagacgagcccagcactggaagtcgccggtgtttccattcggtgatcatcactgaacacagaggactcaccatggagtttgggctgagctgggttttcctcgttgctcttttaagaggtgtccagtgtcaggtgcaactggtggagtctgggggaggcgtggtccagcctgggaggtccctgagactctcttgtacaggctctggattcagcttcaatgcccacgctattcactgggtccgccaggctccaggcaaggggctgcagtgggtggctattatatcatttgatggaaacaagaacaacttcgcagagtccgtgaagggccgattcaccatctccagagacaattccaagaacacagtgtatctgcaaatgaacagcctgagacctgaggacacggctgtgtatttctgtgcgagagatgccacttccaagtaccagccggcattttttcttcatcgcggatcggactacatggacgtctggggcaaagggaccacggtcatcgtttcctcagcctccaccaagggcccatcggtcttccccctggcaccctcctccaagagcacctctgggggcacagcggccctgggctgcctggtcaaggactacttccccgaaccggtgacggtgtcgtggaactcaggcgccctgaccagcggcgtgcacaccttcccggctgtcctacagtcctcaggactctactccctcagcagcgtggtgaccgtgccctccagcagcttgggcacccagacctacatctgcaacgtgaatcacaagcccagcaacaccaaggtggacaa

SEQ ID NO: 375 - DNA, 817 bp, Artificial Sequence; identical to SEQ ID NO: 374
  Synthetic construct

SEQ ID NO: 376 - DNA, 781 bp, Artificial Sequence
  Synthetic construct
ggggacatggaaaatactttctgagagtcctggacctcctgtgccagaacatgaaacatctgtgcttcttcctcctcctggtggcagctcccagatggggcctgtcccaggtgcagctgcaggagtcgggcccaggactggtgaagccttcacagaccctgtccctcacctgcactgtctccggtggctccatcatgactggtacttactactggacgtgggtccggcagcccgccgggaagccactggaatggattgggcatatctatctcagtgggaccaccaactacaacccctccctcgagagtcgagtcaccatgtcaatagacacgtccaagaaccagttctccctgaacctgaagtctgtgaccgccactgacacgggcgtctattactgtgcgagggctttctattctgataaaagtggtaatttaagacttggggcgcgctggttcgatccctggggccagggaagcctggtcaccgtctcctcagcctccaccaagggcccatcggtcttccccctggcaccctcctccaagagcacctctgggggcacagcggccctgggctgcctggtcaaggactacttccccgaaccggtgacggtgtcgtggaactcaggcgccctgaccagcggcgtgcacaccttcccggctgtcctacagtcctcaggactctactccctcagcagcgtggtgaccgtgccctccagcagcttgggcacccagacctacatctgcaacgtgaatcacaagcccagcaacaccaaggtggacaa

SEQ ID NO: 377 - DNA, 759 bp, Artificial Sequence
  Synthetic construct
gggagtctccctcactgcccagctgggatctcagggcttcattttctgtcctccaccatcatggggtcaaccgccatcctcgccctcctcctggctgttctccaaggagtctgtgccgaggtccagctggtgcagtctggagcagtggtgaaaaaaccgggggactctctgaagatctcctgtaagacttctggatacacctttagcgactactggatcggctgggtgcgccagatgcccgggaaaggcctggagtggatggggatcatctttcctggtgactctgataccaaatacaatccgtcgttccgagggcaggtcaccatctcagacgacaagtccatcaatgccgcccacctgcagtggagcagcctgaaggcctcggacagcgccatctattactgtgcgagactgcccggtgactacggtggttttgatatctggggccaagggacagtggtcaccgtctcctcagcctccaccaagggcccatcggtcttccccctggcgccctgctccaggagcacctctgggggcacagcggccctgggctgcctggtcaaggactacttccccgaaccggtgacggtgtcgtggaactcaggcgccctgaccagcggcgtgcacaccttcccggctgtcctacagtcctcaggactctattccctcagcagcgtggtgaccgtgccctccagcaacttcggcacccagacctacacctgcaacgtagatcacaagcccagcaacaccaaggtggac

SEQ ID NO: 378 - DNA, 714 bp, Artificial Sequence
  Synthetic construct
ggggagctctgggagaagagccccagccccagaattcccaggagtttccattcggtgatcagcactgaacacagaggactcaccatggagtttgggctgagctgggttttccttgttgctattataaaaggtgtccaatgtcaggtgcaactggtggagtctgggggaggcttggtcaagcctggagggtccctgagactctcctgttctgcctctggattcacattcagtgactactacatgagctggatccgccaggctccagggaaggggctggagtgggttgcgtacattaatagtcgtggaactaccacatactacggagactctgtacagggccgattcaccgtctccagggacaacgccgggaactcattgtttcttcagatgaacaacttgagagccgaggacacggccgtgtattattgtgcgagagatgccccttggtataacgcgaactatcggggttgggtcgacccctggggccagggagccctggtcatcgtctcctcagcctccaccaagggcccatcggtcttccccctggcaccctcctccaagagcacctctgggggcacagcggccctgggctgcctggtcaaggactacttccccgaaccggtgacggtgtcgtggaactcaggcgccctgaccagcggcgtgcacaccttcccggctgtcctacagtcctcaggactctactccctcagcagc

SEQ ID NO: 379 - DNA, 734 bp, Artificial Sequence
  Synthetic construct
gggagagcatcacataacaaccagattcctcctctaaagaagcccctgggagcacagctcatcaccatggactggacctggaggttcctctttgtggtggcagcagctacacgtgtccaatcccaggtccagctggtgcagtctggggctgaggtgaagaagcctgggtcctcggtgaaggtctcctgcaaggcctctggaggctcgttcaacagttttgctatcagctgggtgcgacaggcccctggacaagggcttgagtggatgggaggaatcatccctatcttggacacagcacaatacgcacagaaatttcagggcagagtcacgattagcgcggacgacttcacggacacagcctacatggagttgagcagcctgagatatgacgacacggccctgtatttctgtgcgagagattcgtactattatgatagtactggttatagggccggggacttccaggactggggccagggcaccctggtcaccgtctcctcagcctccaccaagggcccatcggtcttccccctggcaccctcctccaagagcacctctgggggcacagcggccctgggctgcctggtcaaggactacttccccgaaccggtgacggtgtcgtggaactcaggcgccctgaccagcggcgtgcacaccttcccggctgtcctacagtcctcaggactctactccctcagcagcgtggtgaccgtgccctccagcagcttgggcac

SEQ ID NO: 380 - DNA, 861 bp, Artificial Sequence
  Synthetic construct
gggctccctctactgatgaaaaccagcccagccctgaccctgcaactctgggagaggagcccagcactagaagtcggcggtgtttccattcggtgatcagcactgagcacagaggactcaccatggagtttgggctgaactgggttttcctcgttgctcttttaagaggtgtccagtgtcaggtgcaactggtggagtcggggggaggcgtggtccagcctgggaggtccctgagactctcttgtgcggcctctggattcaccttcactaattatggcattcactgggtccgccaggcgccaggcaaggggctggagtgggtggcagttatctcacatgatggagggaacaagtattattcagactccgtgacgggccgattcaccatctccagagacaattccaagaacacggtgtttctgcaaatgaacaacctgagaactgaggacacggctctctattactgtgcgaaagatcaggggcactctgaacttacgatttctgcagtgctgaagtggccctattactacgctttggacgtctggggccaagggaccacggtcgccgtctcctcagcctccaccaagggcccatcggtcttccccctggcaccctcctccaagagcacctctgggggcacagcggccctgggctgcctggtcaaggactacttccccgaaccggtgacggtgtcgtggaactcaggcgccctgaccagcggcgtgcacaccttcccggctgtcctacagtcctcaggactctactccctcagcagcgtggtgaccgtgccctccagcagcttgggcacccagacctacatctgcaacgtgaatcacaagcccagcaacaccaaggtggaca

SEQ ID NO: 381 - DNA, 798 bp, Artificial Sequence
  Synthetic construct
ggggagctctgggagaagagccccagccccagaattcccaggagtttccattcggtgatcagcactgaacacagaggactcaccatggagtttgggctgagctgggttttccttgttgctattataaaaggtgtccaatgtcaggtgcaactggtggagtctgggggaggcttggtcaagcctggagggtccctgagactctcctgttctgcctctggattcacattcagtgactactacatgagctggatccgccaggctccagggaaggggctggagtgggttgcgtacattaatagtcgtggaactaccacatactacggagactctgtacagggccgattcaccgtctccagggacaacgccgggaactcattgtttcttcagatgaacaacttgagagccgaggacacggccgtgtattattgtgcgagagatgccccttggtataacgcgaactatcggggttgggtcgacccctggggccagggagccctggtcatcgtctcctcagcctccaccaagggcccatcggtcttccccctggcgccctgctccaggagcacctccgagagcacagcggccctgggctgcctggtcaaggactacttccccgaaccggtgacggtgtcgtggaactcaggcgccctgaccagcggcgtgcacaccttcccggctgtcctacagtcctcaggactctattccctcagcagcgtggtgaccgtgccctccagcaacttcggcacccagacctacacctgcaacgtagatcacaagcccagcaacaccaaggtggac

SEQ ID NO: 382 - DNA, 784 bp, Artificial Sequence
  Synthetic construct
ggggacccaaaaaccacacccctccttgggagaatcccctagatcacagctcctcaccatggactggacctggagcatacttttcttggtggcagcagcaacaggtgcccactcccaggttcagctggtgcagtctggaacagaggtgaagaagcctggggcctcagtgaaagtctcctgcaagggttccggttacatctttacgcactatggtatcacttgggtgcgacaggcccctggacaaggacttgagtggatgggatggatcagcgcttacaatggtaaaacagactattcacggaaggtccagggcagagtcacgatgaccacagacacatccacgagcacggcctacatggagttgaggggtctgagatttgacgacacggccgtctattactgtgcgcgccgccattattacgatacgagcggtgattacgtcctcgactcttactattttgacttttggggccagggtaccctggtcaccgtctcctccgcctccaccaagggcccatcggtcttccccctggcaccctcctccaagagcacctctgggggcacagcggccctgggctgcctggtcaaggactacttccccgaaccggtgacggtgtcgtggaactcaggcgccctgaccagcggcgtgcacaccttcccggctgtcctacagtcctcaggactctactccctcagcagcgtggtgaccgtgccctccagcagcttgggcacccagacctacatctgcaacgtgaatcacaagcccagcaacaccaaggtggac

SEQ ID NO: 383 - DNA, 786 bp, Artificial Sequence
  Synthetic construct
ggggacccaaaaaccacacccctccttgggagaatcccctagatcacagctcctcaccatggactggacctggagcatacttttcttggtggcagcagcaacaggtgcccactcccaggttcacctggtgcagtctggagcagaggtgaagaagcctggggcctcagtgaaagtctcctgcaagccttccggttacatctttacgcactatggtatcacttgggtgcgacaggcccctggacaaggacttgagtggatgggatggatcagcgcttacaatggtaaaacagactattcacagaaggtccagggcagagtcacgatgaccacagacacatccacgagcacggcctacatggagttgaggggtctgagatatgacgacacggccgtctattactgtgcgcgccgccattattacgatacgagcggtgattacgtcctcgactcttactattttgacttttggggccagggaaccctggtcaccgtctcctccgcctccaccaagggcccatcggtcttccccctggcaccctcctccaagagcacctctgggggcacagcggccctgggctgcctggtcaaggactacttccccgaaccggtgacggtgtcgtggaactcaggcgccctgaccagcggcgtgcacaccttcccggctgtcctacagtcctcaggactctactccctcagcagcgtggtgaccgtgccctccagcagcttgggcacccagacctacatctgcaacgtgaatcacaagcccagcaacaccaaggtggacaa

SEQ ID NO: 384 - DNA, 789 bp, Artificial Sequence
  Synthetic construct
gggggagcatcacataacaaccagattcctcctctaaagaagcccctgggagcacagctcaccaccatggactggacctgcaggttcctctttgtggtggcagcagctacaggtgtccagtcccaggtccagctggtgcagtctggggccgaggtgaagaagcctgggtcctcggtgaaggtctcctgcgaggcttctggagacaccttcaatagtttcagtacttatgctatctcctgggtgcgacaggcccctggacaaggacttgagtggatgggagggatcattcctaagtttggaaaagaaagttctgcacagaagttccagggcagagtcaggtttaccgcggacgaatccacgaggacagcctacatggagctgagcagcctgagatctgaggacacggccgtatattactgtgcgagagatcaattcaccagtgcccggctgggcaactacggtttgagtgtctggggccaagggaccaaggtcaccgtcacctcagcctccaccaagggcccatcggtcttccccctggcaccctcctccaagagcacctctgggggcacagcggccctgggctgcctggtcaaggactacttccccgaaccggtgacggtgtcgtggaactcaggcgccctgaccagcggcgtgcacaccttcccggctgtcctacagtcctcaggactctactccctcagcagcgtggtgaccgtgccctccagcagcttgggcacccagacctacatctgcaacgtgaatcacaagcccagcaacaccaaggtggac

SEQ ID NO: 385 - DNA, 790 bp, Artificial Sequence
  Synthetic construct
tatctgggggacccaaaaaccacactcctccttgggagaatcccctagatcacagctcctcaccatggactggacctggagcatccttttcttggtggcagcagcaacaggtggtcactcccaggttcagctggtgcagtcaggagctgagctgaagaagcctggggcctcagtgaaggtctcctgcacatcttctggttacactttcaccaactatggcatcacctggctgcgacaggcccctggacaagggcttgagtggatgggatggatcagcgcttacaatggtgactcaaactatgcacataagttgcagggcagagtcaccatgaccacagacacttccactagcacagcctacatggaactgaggagcctgaggtccgacgacacggccgtatattactgtgcgagacgaacgtattactatgacgatagtgaatacataacgaatttgtactactttgacacctggggccagggaaccctggtcaccgtctcctcagcctccaccaagggcccatcggtcttccccctggcaccctcctccaagagcacctctgggggcacagcggccctgggctgcctggtcaaggactacttccccgaaccggtgacggtgtcgtggaactcaggcgccctgaccagcggcgtgcacaccttcccggctgtcctacagtcctcaggactctactccctcagcagcgtggtgaccgtgccctccagcagcttgggcacccagacctacatctgcaacgtgaatcacaagcccagcaacaccaaggtggac

SEQ ID NO: 386 - DNA, 695 bp, Artificial Sequence
  Synthetic construct
ggggagctctgagagaggagcccagccctgggattttcaggtgttttcatttggtgatcaggactgaacagagagaactcaccatggagtttgggctgaactggcttttgcttgtggcttttttaaaaggtgtccagtgtgaggtgcagttgttggagtctgggggaggcttggtacagccgggggggtccctgagactctcctgtgcagcctctggaatcacctttaacaactatgccatgacctgggtccgccaggctccagggaaggggctggagtgggtctcggccattagcagtagtggtattagcacatatcatttagactccgtgaagggccggttcaccatctccagagacaattccaagaacacgctttacctgcaaatggacatcctgagagccgaggacacggccgtatattattgtgcgaaacacatgtgtaggagcccgatggggtcctgcttctacatggacgtctggggcatggggaccacggtcatcgtctcctcagcctccaccaagggcccatcggtcttccccctggcaccctcctccaagagcacctctgggggcacagcggccctgggctgcctggtcaaggactacttccccgaaccggtgacggtgtcgtggaactcaggcgccctgaccagcggcgtgcacaccttcccggctgtcctacagtcctcagga

SEQ ID NO: 387 - DNA, 760 bp, Artificial Sequence
  Synthetic construct
ggggaaaatactttctgagagtcctggacctcctgtgcaagaacatgaaacatctgtggttcttccttctcctggtggcagctcccggatgggtcctgtcccaggtgcagctgcaggagtcgggcccaggactggtgaagccttcggagaccctgtccctcacctgtactgtctccggtggctccatcagtagttatttctggagctggatccgacagaccccagggaagggactggagtggattgcatacatttattacactgggaacaccaactataacccatccctcaagagtcgagtcaccatatcaatagacacgtccaagaaccaggtgtccctgaagttgaactctgtaaccgctgcggacacggccgtttattactgtgcgagaggctttcgaccttccccttttagtaaccacccatactactttgactactggggccagggagccctggtcaccgtctcctcaccctccaccaagggcccatcggtcttccccctggcaccctcctccaagagcacctctgggggcacagcggccctgggctgcctggtcaaggactacttccccgaaccggtgacggtgtcgtggaactcaggcgccctgaccagcggcgtgcacaccttcccggctgtcctacagtcctcaggactctactccctcagcagcgtggtgaccgtgccctccagcagcttgggcacccagacctacatctgcaacgtgaatcacaagcccagcaacaccaaggtggacaa

SEQ ID NO: 388 - DNA, 681 bp, Artificial Sequence
  Synthetic construct
ggggaaaattcaggttccagctcacatgggaaatactttctgagagtcctggacctcctgtgcaagaacatgaaacatctgtggttcttccttctcctggtggcagctcccggatgggtcctgtcccaggtgcagctgcaggagtcgggcccaggactggtgaagccttcggagaccctgtccctcacctgtactgtctccggtggctccatcagtagttatttctggagctggatccgacagaccccagggaagggactggagtggattgcatacatttattacactgggaacaccaactataacccatccctcaagagtcgagtcaccatatcaatagacacgtccaagaaccaggtgtccctgaagttgaactctgtaaccgctgcggacacggccgtttattactgtgcgagaggctttcgaccttccccttttagtaaccacccatactactttgactactggggccagggagccctggtcaccgtctcctcaccctccaccaagggcccatcggtcttccccctggcaccctcctccaagagcacctctgggggcacagcggccctgggctgcctggtcaaggactacttccccgaaccggtgacggtgtcgtggaactcaggcgccctgaccagcggcgtgcacaccttcccggctgtcctacagtcctcagga

SEQ ID NO: 389 - DNA, 725 bp, Artificial Sequence
  Synthetic construct
ggggaggttccagctcacatgggaaatactttctgagagtcctggacctcctgtgcaagaacatgaaacatctgtggttcttccttctcctggtggcagctcccggatgggtcctgtcccaggtgcagctgcaggagtcgggcccaggactggtgaagccttcggagaccctgtccctcacctgtactgtctccggtggctccatcagtagttatttctggagctggatccgacagaccccagggaagggactggagtggattgcatacatttattacactgggaacaccaactataacccatccctcaagagtcgagtcaccatatcaatagacacgtccaagaaccaggtgtccctgaagttgaactctgtaaccgctgcggacacggccgtttattactgtgcgagaggctttcgaccttccccttttagtaaccacccatactactttgactactggggccagggagccctggtcaccgtctcctcaccctccaccaagggcccatcggtcttccccctggcaccctcctccaagagcacctctgggggcacagcggccctgggctgcctggtcaaggactacttccccgaaccggtgacggtgtcgtggaactcaggcgccctgaccagcggcgtgcacaccttcccggctgtcctacagtcctcaggactctactccctcagcagcgtggtgaccgtgccctccagcagcttgggcacc

SEQ ID NO: 390 - DNA, 813 bp, Artificial Sequence
  Synthetic construct
gaaatactttctgagagtcctggacctcctgtgcaagaacatgaaacatctgtggttcttccttctcctggtggcagctcccggatgggtcctgtcccaggtgcagctgcaggagtcgggcccaggactggtgaagccttcggagaccctgtccctcacctgtactgtctccggtggctccatcagtagttatttctggagctggatccgacagaccccagggaagggactggagtggattgcatacatttattacactgggaacaccaactataacccatccctcaagagtcgagtcaccatatcaatagacacgtccaagaaccaggtgtccctgaagttgaactctgtaaccgctgcggacacggccgtttattactgtgcgagaggctttcgaccttccccttttagtaaccacccatactactttgactactggggccagggagccctggtcaccgtctcctcaccctccaccaagggcccatcggtcttccccctggcgccctgctccaggagcacctccgagagcacagcggccctgggctgcctggtcaaggactacttccccgaaccggtgacggtgtcgtggaactcaggcgccctgaccagcggcgtgcacaccttcccggctgtcctacagtcctcaggactgctgaataacttctatcccagagaggccaaagtacagtggaaggtggataacgccctccaatcgggtaactcccaggagagtgtcacagagcaggacagcaaggacagcacctacagcctcagcagcaccctgacgctgagcaaagcagactacgagaa

SEQ ID NO: 391 - DNA, 765 bp, Artificial Sequence
  Synthetic construct
gggacatgggaaatactttctgagagtcctggacctcctgtgcaagaacatgaaacatctgtggttcttccttctcctggtggcagctcccggatgggtcctgtcccaggtgcagctgcaggagtcgggcccaggactggtgaagccttcggagaccctgtccctcacctgtactgtctccggtggctccatcagtagttatttctggagctggatccgacagaccccagggaagggactggagtggattgcatacatttattacactgggaacaccaactataacccatccctcaagagtcgagtcaccatatcaatagacacgtccaagaaccaggtgtccctgaagttgaactctgtaaccgctgcggacacggccgtttattactgtgcgagaggctttcgaccttccccttttagtaaccacccatactactttgactactggggccagggagccctggtcaccgtctcctcaccctccaccaagggcccatcggtcttccccctggcaccctcctccaagagcacctctgggggcacagcggccctgggctgcctggtcaaggactacttccccgaaccggtgacggtgtcgtggaactcaggcgccctgaccagcggcgtgcacaccttcccggctgtcctacagtcctcaggactctactccctcagcagcgtggtgaccgtgccctccagcagcttgggcacccagacctacatctgcaacgtgaatcacaagcccagcaacaccaaggtggacaa

SEQ ID NO: 392 - DNA, 659 bp, Artificial Sequence
  Synthetic construct
ggggatcatccaacaaccacatcccttctctacagaagcctctgagaggaaaggtcttcaccatggactggacctggagggtcttctgcttgctggctgtagctccaggtgctcactcccaggtgcagctggtgcagtctggggctgaggtgaaggagcctggggcctcagtgaaggtttcctgcacggcatctggaaataccttcaccacttattatatgcagtgggtgcgacaggcccctggacaaggccctgagtgggtgggaatgatcaatcctactggtgaaaacacaaggtacgcacagaagttccagggcagagtcaccatgaccagggacacgtccacgagcacagtttacatggagctgaccagcctgagatctgacgacacggccgtgtattactgtgcgagaacgggggttcattttttgtacttcgatctttggggccctggcaccctggtcactgtctcctcagcctccaccaagggcccatcggtcttccccctggcaccctcctccaagagcacctctgggggcacagcggccctgggctgcctggtcaaggactacttccccgaaccggtgacggtgtcgtggaactcaggcgccctgaccagcggcgtgcacaccttcccggctgtcctacagtcctcagga

SEQ ID NO: 393 - DNA, 752 bp, Artificial Sequence
  Synthetic construct
ggggaaatactttctgagagtcctggacctcctgtgcaagaacatgaaacatctgtggttcttccttctcctggtggcagctcccagatgcgtcctgtcccaggcgcagctgcaggagtcgggcccaggactggtgaagccttcggagaccctgtccctcacctgcgctgtctctggtgattccatcactacttattattggggctggatccggcagcccccagggaagggactggaatggattggatatatctattacactgggagcaccaactacaacccctccctcaagagtcgagtcaccatatcactagacacgtccaagaaccatttctccctgaagctgacctctgtgaccttagcggacacggccatgtattattgtgcgagagttcgggtaccagcagtcatctttggtggtgctttagatatctggggccaagggacaatggtcaccgtctcttcagcctccaccaagggcccatcggtcttccccctggcgccctgctccaggagcacctctgggggcacagcggccctgggctgcctggtcaaggactacttccccgaaccggtgacggtgtcgtggaactcaggcgccctgaccagcggcgtgcacaccttcccggctgtcctacagtcctcaggactctactccctcagcagcgtggtgaccgtgccctccagcagcttgggcacccagacctacacctgcaacgtgaatcacaagcccagcaacaccaaggtggaca

SEQ ID NO: 394 - DNA, 806 bp, Artificial Sequence
  Synthetic construct
tggggagctctcagagaggtgccttagtcctggattccaaggcatttccacttggtgatcagcactgaacacagaggactcaccatggagttggggctgtgctgggttttccttgttgctattttagaaggtgtccagtgtgaggtgcaactggtggagtctgggggagacttggtacagcctggggggtccctgagactctcctgtgcagcctctggattcaacttcaatatttatagcatgaactgggtccgccaggctccagggaaggggctggagtgggtttcatacattagcagtactagtaccaccatcttttacgcagactctgtgaagggccgattctccatctccagagacaatgccaggaagtcactgtatctgcaaatgaacagcctgagagccgaagacacggctgtgtatttttgtgcaaaagatagcgaattccggcaatggttcggggagttgcctcacccacttgactcctggggccagggaaccctggtcaccgtctcctcagcctccaccaagggcccatcggtcttccccctggcgccctgctccaggagcacctccgagagcacagcggccctgggctgcctggtcaaggactacttccccgaaccggtgacggtgtcgtggaactcaggcgccctgaccagcggcgtgcacaccttcccggctgtcctacagtcctcaggactctattccctcagcagcgtggtgaccgtgccctccagcaacttcggcacccagacctacacctgcaacgtagatcacaagcccagcaacaccaaggtggacaa

SEQ ID NO: 395 - DNA, 799 bp, Artificial Sequence
  Synthetic construct
ggggagctctgagagaggagcccagccctgggattttcaggtgttttcatttggtgatcaggactgaacagagagaactcaccatggagtttgggctgagctggcttttgcttgtggcttttttaaaaggtgtccagtgtgaggtgcagctgttggagtctgggggaggcttggtacagccgggggggtccctgagactctcctgtgcagcctctggaatcacctttagcaactatgccatgacctgggtccgccaggctccagggaaggggctggagtgggtctcggccattagcagtagtggtattagcacatatcatctagactccgtgaagggccggttcaccatctccagagacaattccaagaacacgctttacctgcaaatggacagcctgagagccgaggacacggccgtatattattgtgcgaaacacatgtgtaggagcccgatggggtcctgcttctacatggacgtctggggcatggggaccacggtcatcgtctcctcagcctccaccaagggcccatcggtcttccccctggcgccctgctccaggagcacctctgggggcacagcggccctgggctgcctggtcaaggactacttccccgaaccggtgacggtgtcgtggaactcaggcgccctgaccagcggcgtgcacaccttcccggctgtcctacagtcctcaggactctactccctcagcagcgtggtgaccgtgccctccagcagcttgggcacccagacctacacctgcaacgtgaatcacaagcccagcaacaccaaggtggacaa

SEQ ID NO: 396 - DNA, 746 bp, Artificial Sequence
  Synthetic construct
ggggagctctcagagaggtgccttagtcctggattccaaggcatttccacttggtgatcagcactgaacacagaggactcaccatggagttggggctgtgctgggttttccttgttgctattttagaaggtgtccagtgtgaggtgcaactggtggagtctgggggagacttggtacagcctggggggtccctgagactctcctgtgcagcctctggattcaacttcaatatttatagcatgaactgggtccgccaggctccagggaaggggctggagtgggtttcatacattagcagtactagtaccaccatcttttacgcagactctgtgaagggccgattctccatctccagagacaatgccaggaagtcactgtatctgcaaatgaacagcctgagagccgaagacacggctgtgtatttttgtgcaaaagatagcgaattccggcaatggttcggggagttgcctcacccacttgactcctggggccagggaaccctggtcaccgtctcctcagcctccaccaagggcccatcggtcttccccctggcaccctcctccaagagcacctctgggggcacagcggccctgggctgcctggtcaaggactacttccccgaaccggtgacggtgtcgtggaactcaggcgccctgaccagcggcgtgcacaccttcccggctgtcctacagtcctcaggactctactccctcagcagcgtggtgaccgtgccctccagcagcttg

SEQ ID NO: 397 - DNA, 797 bp, Artificial Sequence
  Synthetic construct
gggaccatcacacaacagccacatccctcccctacagaagcccccagagcgcagcacctcaccatggactgcacctggaggatcctcttcttggtggcagcagctacaggcacccacgcccaggtccaggtggtgcagtctggggctgaggtgaagaagcctggggcctcagtgaaggtctcctgcaaggttttcggatacaccctcactcaattgtccatgcactgggtgcgacaggctcgtgggaaagggcttgagtggatgggaggttttgatcctgaagatggtcaaagaatctacgcacagaagttccagggcagagtcagcatgaccgaggacacatctacagagacagcctacatggagctgagggggctgggacctgaggacacggccgtatattattgtgcaacaggggcggatttacgaatgatggcctttgggggagttatcggtatagggggggggatggacgtctggggccaagggaccacggtcaccgtctcctcagcctccaccaagggcccatcggtcttccccctggcaccctcctccaagagcacctctgggggcacagcggccctgggctgcctggtcaaggactacttccccgaaccggtgacggtgtcgtggaactcaggcgccctgaccagcggcgtgcacaccttcccggctgtcctacagtcctcaggactctactccctcagcagcgtggtgaccgtgccctccagcagcttgggcacccagacctacatctgcaacgtgaatcacaagcccagcaacaccaaggtggacaa

SEQ ID NO: 398 - DNA, 795 bp, Artificial Sequence
  Synthetic construct
ggggaccatcacacaacagccacatccctcccctacagaagcccccagagcgcagcacctcaccatggactgcacctggaggatcctcttcttggtggcagcagctacaggcacccacgcccaggtccaggtggtgcagtctggggctgaggtgaagaagcctggggcctcagtgaaggtctcctgcaaggttttcggatacaccctcactcaattgtccatgcactgggtgcgacaggctcgtgggaaagggcttgagtggatgggaggttttgatcctgaagatggtcaaagaatctacgcacagaagttccagggcagagtcagcatgaccgaggacacatctacagagacagcctacatggagctgagggggctgggacctgaggacacggccgtatattattgtgcaacaggggcggatttacgaatgatggcctttgggggagttatcggtatagggggggggatggacgtctggggccaagggaccacggtcaccgtctcctcagcctccaccaagggcccatcggtcttccccctggcaccctcctccaagagcacctctgggggcacagcggccctgggctgcctggtcaaggactacttccccgaaccggtgacggtgtcgtggaactcaggcgccctgaccagcggcgtgcacaccttcccggctgtcctacagtcctcaggactctactccctcagcagcgtggtgaccgtgccctccagcagcttgggcacccagacctacatctgcaacgtgaatcacaagcccagcaacaccaaggtgga

SEQ ID NO: 399 - DNA, 682 bp, Artificial Sequence
  Synthetic construct
ggggaccatcacacaacagccacatccctcccctacagaagcccccagagcgcagcacctcaccatggactgcacctggaggatcctcttcttggtggcagcagctacaggcacccacgcccaggtccatctggtacagtctggggctgaggtgaagaagcctggggcctcagtgaaagtctcctgcaaggtttccggatacagccacactgaagttcccatccactgggtgcgacaggctcctggaaaagggcctgagtggatgggaggctttgatcctgaagagggtaaaacaatctacgcacagaagttccagggcagagtcaccatgaccgaggacacatctacagacacagcctacatggagctgagcaggctgacatctgaggacacggccttttattattgtgcaacaggccacctttctttgactggttattataccgtaagttactactttgactattggggccagggaaccctggtcaccgtctcttcagcctccaccaagggcccatcggtcttccccctggcaccctcctccaagagcacctctgggggcacagcggccctgggctgcctggtcaaggactacttccccgaaccggtgacggtgtcgtggaactcaggcgccctgaccagcggcgtgcacaccttcccggctgtcctacagtcctcagga

SEQ ID NO: 400 - DNA, 743 bp, Artificial Sequence
  Synthetic construct
gggacccaaaaaccacactcctccttgggagaatcccctagatcacagctcctcaccatggactggacctggagcatccttttcttggtggcagcagcaacaggtggtcactcccaggttcagctggtgcagtcaggagctgaggtgaagaagcctggggcctcagtgaaggtctcctgcacatcttctggttacactttcaccaactatggaatcagctggctgcgacaggcccctggacaagggcttgagtggatgggatggatcagcgcttacaatggtaacacaaactatgcacacaagttccagggcagagtcagcatgaccacagacacttccactagcacagcctacatggaactgaggagcctgaggtctgacgacacggccgtatattactgtgcgagacgaacgtattactatgatgatagtgaatacataacgaatttgtactactttgacaactggggccagggaaccctggtcaccgtctcctcagcctccaccaagggcccatcggtcttccccctggcaccctcctccaagagcacctctgggggcacagcggccctgggctgcctggtcaaggactacttccccgaaccggtgacggtgtcgtggaactcaggcgccctgaccagcggcgtgcacaccttcccggctgtcctacagtcctcaggactctactccctcagcagcgtggtgaccgtgccctccagcagcttgggcacccagacctacat

SEQ ID NO: 401 - DNA, 682 bp, Artificial Sequence
  Synthetic construct
ggggacccaaaaaccacacccctccttgggagaatcccctagatcacagctcctcaccatggactggacctggagcatacttttcttggtggcagcagcaacaggtgcccactcccaggttcagctggtgcagtctggagcagaggtgaagaagcctggggcctcagtgaaagtctcctgcaaggcttccggttacatctttacgcactatggtatcacttgggtgcgacaggcccctggacaaggacttgagtggatgggatggatcagcgcttacaatggtaaaacaaactatgcacagaaggtccagggcagagtcaccatgaccacagacacatccacgagcacagcctacatggagttgaggggtctgagatctgacgacacggccgtctattactgtgcgcgccgccattattatgatacgagcggttattacctcctcgactcttactattttgactattggggccagggaaccctggtcaccgtctcctccgcctccaccaagggcccatcggtcttccccctggcaccctcctccaagagcacctctgggggcacagcggccctgggctgcctggtcaaggactacttccccgaaccggtgacggtgtcgtggaactcaggcgccctgaccagcggcgtgcacaccttcccggctgtcctacagtcctcagga

SEQ ID NO: 402 - DNA, 721 bp, Artificial Sequence
  Synthetic construct
ggggacccaaaaaccacacccctccttgggagaatcccctagatcacagctcctcaccatggactggacctggagcatacttttcttggtggcagcagcaacaggtgcccactcccaggttcagctggtgcagtctggagcagaggtgaagaagcctggggcctcagtgaaagtctcctgcaaggcttccggttacatctttacgcactatggtatcacttgggtgcgacaggcccctggacaaggacttgagtggatgggatggatcagcgcttacaatggtaaaacaaactatgcacagaaggtccagggcagagtcaccatgaccacagacacatccacgagcacagcctacatggagttgaggggtctgagatctgacgacacggccgtctattactgtgcgcgccgccattattatgatacgagcggttattacctcctcgactcttactattttgactattggggccagggaaccctggtcaccgtctcctccgcctccaccaagggcccatcggtcttccccctggcaccctcctccaagagcacctctgggggcacagcggccctgggctgcctggtcaaggactacttccccgaaccggtgacggtgtcgtggaactcaggcgccctgaccagcggcgtgcacaccttcccggctgtcctacagtcctcaggactctactccctcagcagcgtggtgaccgtgccctccagc

SEQ ID NO: 403 - DNA, 688 bp, Artificial Sequence
  Synthetic construct
ggggatcacccaaaaaccacacccctccttgggagaatcccctagatcacagctcctcaccatggactggacctggagcatccttttcttggtggcagcagcaacaggtgtccactcccaggttcagttggtgcagtctggagctgaggtgaagaagcctggggcctcagtgaaggtctcctgcaagacttctggttacacgtttaccagttatggtatcggttgggtgcgacaggcccgtggacaagggcttgagtggatgggatggatcagcgcttacaatggcgacacaaaatatgcacataagttccagggcagagtcaccatgaccacagacacatccacgagcacagccttcatggacctgaggagcctgagatctgacgacacggccgtctatttctgtgcgagacgctcgtattactatgatgatagtgaatacatctatgagggaagatactactttgactactggggccagggaaccctggtcaccgtctcctcagcctccaccaagggcccatcggtcttccccctggcaccctcctccaagagcacctctgggggcacagcggccctgggctgcctggtcaaggactacttccccgaaccggtgacggtgtcgtggaactcaggcgccctgaccagcggcgtgcacaccttcccggctgtcctacagtcctcagga

SEQ ID NO: 404 - DNA, 789 bp, Artificial Sequence
  Synthetic construct
tggggacccaaaaaccacacccctccttgggagaatgccctagatcacagctcctcaccatggactggacctggagcatcgttttcttggtggcagcagcaacaggtgcccactcccaggttcagctggtgcagtctggagctgaggtgaagaagcctggggcctcagtgaaggtctcctgcaaggcctctggttacatgtttactagctttggtatcagttgggtgcgacaggcccctggacaagggcttgagtggatgggatggatcagcgcttacaatgggaacacaaactttgcacagaagttccagggcagagtcaccttgaccacagacacatccacgagcacagcctacatggagctgaggagcctgacatctgacgacacggccgtatattactgtgcgagacgctcgtattactatgatagtagtgactacatttatgagggaaggtactactttgactactggggccagggagccctagtcaccgtctcctcagcctccaccaagggcccatcggtcttccccctggcgccctgctccaggagcacctctgggggcacagcggccctgggctgcctggtcaaggactacttccccgaaccggtgacggtgtcgtggaactcaggcgccctgaccagcggcgtgcacaccttcccggctgtcctacagtcctcaggactctactccctcagcagcgtggtgaccgtgccctccagcagcttgggcacccagacctacatctgcaacgtgaatcacaagcccagcaacaccaaggtggaca

SEQ ID NO: 405 - DNA, 788 bp, Artificial Sequence
  Synthetic construct
ggggacccaaaaaccacacccctccttgggagaatgccctagatcacagctcctcaccatggactggacctggagcatcgttttcttggtggcagcagcaacaggtgcccactcccaggttcagctggtgcagtctggagctgaggtgaagaagcctggggcctcagtgaaggtctcctgcaaggcctctggttacatgtttactagctttggtatcagttgggtgcgacaggcccctggacaagggcttgagtggatgggatggatcagcgcttacaatgggaacacaaactttgcacagaagttccagggcagagtcaccttgaccacagacacatccacgagcacagcctacatggagctgaggagcctgacatctgacgacacggccgtatattactgtgcgagacgctcgtattactatgatagtagtgactacatttatgagggaaggtactactttgactactggggccagggagccctagtcaccgtctcctcagcctccaccaagggcccatcggtcttccccctggcaccctcctccaagagcacctctgggggcacagcggccctgggctgcctggtcaaggactacttccccgaaccggtgacggtgtcgtggaactcaggcgccctgaccagcggcgtgcacaccttcccggctgtcctacagtcctcaggactctactccctcagcagcgtggtgaccgtgccctccagcagcttgggcacccagacctacatctgcaacgtgaatcacaagcccagcaacaccaaggtggaca

SEQ ID NO: 406 - DNA, 737 bp, Artificial Sequence
  Synthetic construct
tagatggggacccaaaaaccacacccctccttgggagaatgccctagatcacagctcctcaccatggactggacctggagcatcgttttcttggtggcagcagcaacaggtgcccactcccaggttcagctggtgcagtctggagctgaggtgaagaagcctggggcctcagtgaaggtctcctgcaaggcctctggttacatgtttactagctttggtatcagttgggtgcgacaggcccctggacaagggcttgagtggatgggatggatcagcgcttacaatgggaacacaaactttgcacagaagttccagggcagagtcaccttgaccacagacacatccacgagcacagcctacatggagctgaggagcctgacatctgacgacacggccgtatattactgtgcgagacgctcgtattactatgatagtagtgactacatttatgagggaaggtactactttgactactggggccagggagccctagtcaccgtctcctcagcctccaccaagggcccatcggtcttccccctggcgccctgctccaggagcacctccgagagcacagcggccctgggctgcctggtcaaggactacttccccgaaccggtgacggtgtcgtggaactcaggcgccctgaccagcggcgtgcacaccttcccggctgtcctacagtcctcaggactctactccctcagcagcgtggtgaccgtgaccgccagaaacttccc

SEQ ID NO: 407 - DNA, 784 bp, Artificial Sequence
  Synthetic construct
gggggggagaggagcccagcactagaagtcggcggtgtttccattcggtgatcagcactgaacacagaggactcaccatggagtttgggctgagctgggttttcctcgttgctcttttaagaggtgtccagtgtcaggtgcagctggtggagtctgggggaggcgtggtccagcctgggaggtccctgagactctcctgtgcagcgtctggattcaccttcagtagctatggcatgcactgggtccgccaggctccaggcaaggggctggagtgggtggcagttatatggtatgatggaagtaataaacactatgcagaatccgtgaagggccgattcgccatctccagagacaattccaagaacacgctgtatctgcaaatgaacagcctgagagccgaggacacggctgtgtattactgtgcgagacatgccactcattattctgatagtaaccctggctactggggccagggaaccctggtcaccgtctcctcagcttccaccaagggcccatcggtcttccccctggcgccctgctccaggagcacctctgggggcacagcggccctgggctgcctggtcaaggactacttccccgaaccggtgacggtgtcgtggaactcaggcgccctgaccagcggcgtgcacaccttcccggctgtcctacagtcctcaggactctactccctcagcagcgtggtgaccgtgccctccagcagcttgggcacccagacctacacctgcaacgtgaatcacaagcccagcaacaccaaggtggacaa

SEQ ID NO: 408 - DNA, 766 bp, Artificial Sequence
  Synthetic construct
ggggatcacataaccaccacattcctcctctgaagaagcccctgggagcacagctcatcaccatggactggacctggaagttcctctttgtagtggcagcagctacaggtgtccagtcccaggtccaggtggtgcagtctggggcagaggtgaagaagcctgggtcctcagtgaaggtctcctgcaaggcctctggaagcatcttcactaattatgctatcagctggctgcggcaggcccctggacagggacttgagtggatgggaaggatcatccctctatttggtgcagcaagctacgcacagaatttccagggcagagtcacgattaccgcggacgaatccacgggcacaacgtatttggagctgagaagtctgagatctgaggacacggccatttattactgtgcgaaagagaggcgaatctacggtgactgctttgactcttggggccagggaaccctggtcaccgtctcctcagcctccaccaagggcccatcggtcttccccctggcgccctgctccaggagcacctccgagagcacagcggccctgggctgcctggtcaaggactacttccccgaaccggtgacggtgtcgtggaactcaggcgccctgaccagcggcgtgcacaccttcccggctgtcctacagtcctcaggactctattccctcagcagcgtggtgaccgtgccctccagcaacttcggcacccagacctacacctgcaacgtagatcacaagcccagcaacaccaaggtggacaa

SEQ ID NO: 409 - DNA, 775 bp, Artificial Sequence
  Synthetic construct
gggagcaccacataacaaccagattcctcctctaaagaagcccctgggagcacagctcatcaccatggactggacctggaggttcctctttgtggtggcagcagctgcaggtgtccagtcccaggaccagttggtgcagtctggggctgaagtgaagaagcctgggtccacggtgaaggtctcctgcaagggttctggagccaccttcagcagatatgcaatcacctgggtgcgacaggcccctggacaagggcttgagtgggtgggaggaatcatccctctctttcatacaccaatttatgcacagaaattccagggcagagtcacaatttccgcggatgactccatgagcacagcgtacatggagatgggcagcctgaaatctgaggacacggccgtatattattgtgcgaaagggagggggagctacgcagggcgacacggctcttttgatatgtggggccaggggacagtggtcaccgtctcttcggcctccaccaagggcccatcggtcttccccctggcaccctcctccaagagcacctctgggggcacagcggccctgggctgcctggtcaaggactacttccccgaaccggtgacggtgtcgtggaactcaggcgccctgaccagcggcgtgcacaccttcccggctgtcctacagtcctcaggactctactccctcagcagcgtggtgaccgtgccctccagcagcttgggcacccagacctacatctgcaacgtgaatcacaagcccagcaacaccaaggtggac

SEQ ID NO: 410 - DNA, 766 bp, Artificial Sequence
  Synthetic construct
ggggcatcacataacaaccagattcctcctctaaagaagcccctgggagcacagctcatcaccatggactggacctggaggttcctctttgtggtggcagcagctacaggtgtccagtcccaggtccagctggtgcagtctggggctgaggtgaggaagcctgggtcctcggtgaaggtctcctgcaaggcttctggaggcatcctcaataagtatggtattagttgggtgcgacaggcccctggacaagggcttgagtggatgggagggatcaccgctatttttggtacaacaaaggacgcacagaaattccagggcagagtcacgattaccgcggacgaatccacaaacacagtctacatggaactgagcagcctgagatctgaggacacggccgtctattactgtgcgggaagtgagagttactacataagttattttgatcattggggccagggaaccctggtcaccgtctcctcagcctccaccaagggcccatcggtcttccccctggcgccctgctccaggagcacctctgggggcacagcggccctgggctgcctggtcaaggactacttccccgaaccggtgacggtgtcgtggaactcaggcgccctgaccagcggcgtgcacaccttcccggctgtcctacagtcctcaggactctactccctcagcagcgtggtgaccgtgccctccagcagcttgggcacccagacctacatctgcaacgtgaatcacaagcccagcaacaccaaggtggaca

SEQ ID NO: 411 - DNA, 758 bp, Artificial Sequence
  Synthetic construct
gggagctctgggagaggagcccagcactagaagtcggcggtgtttccattcggtgatcatcactgaacacagaggactcaccatggagtttgggctgagctgggttttcctcgttgctcttttaagaggtgtccagtgtcaggtgcagctggtggagtctgggggaggcgtggtccaccctggggggtccctgagactctcctgtacagcgtctggattcaccttcagtaattatggcatgcactgggtccgccagactccaggcaagggcctggagtgggtggcctttataagatatgatgcaagtacaaaattttctgcagtctccgtgaagggccggttcaccatctccagagacaattccaagaacacactgtatctacaaatgagcagcctgagagctgaggacacggctatgtattactgtgcgaaagatttccccgacaagggctataacctatactaccttgactactggggccagggaaccctggtcaccgtctcgtcagcttccaccaagggcccatcggtcttccccctggcaccctcctccaagagcacctctgggggcacagcggccctgggctgcctggtcaaggactacttccccgaaccggtgacggtgtcgtggaactcaggcgccctgaccagcggcgtgcacaccttcccggctgtcctacagtcctcaggactctactccctcagcagcgtggtgaccgtgccctccagcagcttgggcacccagacctacatctgca

SEQ ID NO: 412 - DNA, 778 bp, Artificial Sequence
  Synthetic construct
ggggagggtcctgctcacatgggaaatactttctgagagtcctggacctcctgtgcaagaacatgaaacacctgtggttcttcctcctgctggtggcagctcccagatgggccctgtcccaggtgcagctgcaggagtcgggcccaggactggtgaagccttcagagaccctgtccctcacctgcactgtctctggtgactccatcagcagtggtgattactactggacctggatccgccagcccccagggaagggcctggagtggattggggacatccactccagtgggggcacccactacaacccgtccgtcaagagtcgagttctcatatcaatagacacctccaagaaccacttctccctgaaagtgacctctgtgactgccgcagacacggccgtgtattattgtgccaggccatcttgtagtcgtaccgtctgcccggggccttttgatatctggggccacgggacaatggtcaccgtctcttcagcctccaccaagggcccatcggtcttccccctggcgccctgctccaggagcacctctgggggcacagcggccctgggctgcctggtcaaggactacttccccgaaccggtgacggtgtcgtggaactcaggcgccctgaccagcggcgtgcacaccttcccggctgtcctacagtcctcaggactctactccctcagcagcgtggtgaccgtgccctccagcagcttgggcacccagacctacacctgcaacgtgaatcacaagcccagcaacaccaaggtggacaa

SEQ ID NO: 413 - DNA, 677 bp, Artificial Sequence
  Synthetic construct
ttgggggagcatcacccagcaaccacatctgtcctctagagaatcccctgagagctccgttcctcaccatggactggacctggaggatcctcttcttggtggcagcagccacaagagcccactcccaggtgcagctggtgcagtctggggctgaggtgaagaagcctggggcctcagtgaaggtctcctgcaaggcttctggatacaccttcaccggctactatattcactgggtgcgacaggcccctggacaaggacttgagtggatgggatggatcaaccctaacagtggtggcacaaactatgcacagaagtttctgggcagggtcaccatgaccagggacacgtccatcagcacagcctacatggagctcaacaggctgagatctgacgacacggccgtgtattactgtgcgaggaggggcggacgagattactcctactcctactacatggacgtctggggcaaggggaccacggtcaccgtctcctcaacctccaccaagggcccatcggtcttccccctggcaccctcctccaagagcacctctgggggcacagcggccctgggctgcctggtcaaggactacttccccgaaccggtgacggtgtcgtggaactcaggcgccctgaccagcggcgtgcacaccttcccggctgtcctacagtcctcagga

SEQ ID NO: 414 - DNA, 820 bp, Artificial Sequence
  Synthetic construct
ggggagctctgagagaggagcccagccctgggattttcaggtgttttcatttggtgatcaggactgaacagagagaacccaccatggagtttgggctgagctggctttttctcgtgactattttaaaaggtgtccagtgtaaagtgcagctgttggagtctgggggaggcttggtacagccgggggggtccctgcgactgtcctgtaaagcctctggattcacctttcacaaatttgacatgagttgggtccgccaggctccggggagggggctagagtgggtctcaggtattcgtgatagtggtggtaagtcctattacgtagactccgtgaagggccggttcaccatctctagagacaactccatggacacactgtatctccaaatgaacagcctgaccgccgaagacacggccacatattactgtgcgaaagttgtcgccggcggacaactgcgatattttgactggcaagaggggcactattacggaatggacgtctggggccaagggaccacggtcatcgtctcctcagcctccaccaagggcccatcggtcttccccctggcaccctcctccaagagcacctctgggggcacagcggccctgggctgcctggtcaaggactacttccccgaaccggtgacggtgtcgtggaactcaggcgccctgaccagcggcgtgcacaccttcccggctgtcctacagtcctcaggactctactccctcagcagcgtggtgaccgtgccctccagcagcttgggcacccagacctacatctgcaacgtgaatcacaagcccagcaacaccaaggtggacaa

SEQ ID NO: 415 - DNA, 680 bp, Artificial Sequence
  Synthetic construct
ggggagctctgagagaggagcccagccctgggattttcaggtgttttcatttggtgatcaggactgaacagagagaactcaccatggagtttgggctgagctggctttttcttgtgcctattttaaaaggtgtccagtgtgaggtgcagctgttggagtctgggggaggcttggcacagcctggggggtccctgagactctcctgtgcagcctctggattcaccttgagcggctatgccgtgagctgggtccgccaggctccagggaaggggctggagtgggtctcaactattagtggtagtggtggtagcacatactacgcagactccgtgaagggccggttcaccatctccagagacaattccaggaacacgctgtatctgcaaatgaacagcctgagagccgaggacacggccgtttattactgtgcgaaagatgatagatatactggtggatctgactactggggccagggaaccctggtcatcgtctcctcagcctccaccaagggcccatcggtcttccccctggcaccctcctccaagagcacctctgggggcacagcggccctgggctgcctggtcaaggactacttccccgaaccggtgacggtgtcgtggaactcaggcgccctgaccagcggcgtgcacaccttcccggctgtcctacagtcctcagga

SEQ ID NO: 416 - DNA, 779 bp, Artificial Sequence
  Synthetic construct
gggagcatcacataacaaccagattcctcctctaaggaagcccctgggagcacagctcatcaccatggactgggcctggaggttcctctttgtggtggcggcagctacaggtgtccagtcccaggtccagctggtgcagtctggggctgaggtgaagaagcctgggtcctcggtgaaggtctcctgcaaggcttctggaggcatcttcaggaattatgctatcagttgggtgcgacaggcccctggacaagggcttgagtggctgggagggatcatccctatctttggtacagcacactacgcaccgaagttccagggcagagtcacaattaccgcggacgaatccacgaccacagcctacatggagctgagcagcctgagatttgaggacacggccgtctattactgtgcgagagattggccccactacaatcgggcgccgggcaactacttcgattcctggggccagggaaccctggtcatcgtctcctcagcctccaccaagggcccatcggtcttccccctggcaccctcctccaagagcacctctgggggcacagcggccctgggctgcctggtcaaggactacttccccgaaccggtgacggtgtcgtggaactcaggcgccctgaccagcggcgtgcacaccttcccggctgtcctacagtcctcaggactctactccctcagcagcgtggtgaccgtgccctccagcagcttgggcacccagacctacatctgcaacgtgaatcacaagcccagcaacaccaaggtggaca

SEQ ID NO: 417 - DNA, 714 bp, Artificial Sequence
  Synthetic construct
gcactctgctgaagaaaaccagccctgcagctctgggagaggagccccagccctgggattcccagctgtttctgcttgctgatcaggactgcacacagagaactcaccatggagtttgggctgagctgggttttccttgttgctatcttaaaaggtgtccagtgtgaggtgcagctggtggagtccgggggaggcttagttcagcctggggggtccctgagactctcctgtgcagcctctggattcaccttcagtaggttctggatacactgggtccgccaagctccagggaaggggctggtgtgggtctcacgtattaatagtgatgggactagcacagattacgcggactccgtgaagggccgattcaccatctccagagacaacgccaagaacacgttgtttttgcaaatgaacagtctgagagccgacgacacggctgtgtattactgtgcaaccgccgtcgtttcgggttcggggttttatgcttttgatctctggggccaagggacaatggtcatcgtctctgcagcctccaccaagggcccatcggtcttccccctggcgccctgctccaggagcacctccgagagcacagcggccctgggctgcctggtcaaggactacttccccgaaccggtgacggtgtcgtggaactcaggcgccctgaccagcggcgtgcacaccttcccggctgtcctacagtcctcagga

SEQ ID NO: 418 - DNA, 746 bp, Artificial Sequence
  Synthetic construct
gggagctctgggagaggagcccagcactagaagtcggcggtgtttccattcggtgatcagcactgaacacagaggactcaccatggagtttgggctgagctgggttttcctcgttgctcttttaagaggtgtccagtgtcaggtgcagctggtggagtctgggggaggcgtggtccagcctgggaggtccctgagactctcctgtgcagcctctggattcaccttcagtggctatggcatgcactgggtccgccaggctccaggcaaggggcttgagtgggtggcagttatatcatatgatggcagtaagaaatactatgcagactccgtgaagggccgattcaccatctccagagacaattccgagaacacgctgtatttgcaaatgaacagcctgagagctgaggacacggctgtgtattactgtgcgaaagatcgctacgcgggccgaaaatattgtagtagtaccagctgctataactactttcattactggggccagggaaccctggtcaccgtctcctcagcttccaccaagggcccatcggtcttccccctggcgccctgctccaggagcacctccgagagcacagcggccctgggctgcctggtcaaggactacttccccgaaccggtgacggtgtcgtggaactcaggcgccctgaccagcggcgtgcacaccttcccggctgtcctacagtcctcaggactctattccctcagcagcgtggtgaccgtgccctcca

SEQ ID NO: 419 - DNA, 776 bp, Artificial Sequence
  Synthetic construct
ggggggcatcacataaccaccacattcctcctctgaagaagcccctgggagcacagctcatcaccatggactggacctggaggttcctctttgtggtggcagcagctacaggtgtccagtcccaggtccagctggtgcagtctggggctgaggtgaagaagcctgggtcctcagtgaaggtctcctgcaaggcttctgcaggcatcttcagcaactatgctatcagctgggtgcgacaggcccctggacaagggcttgactggatgggaaggatcatccctctctttggttcgacaaactacgcacagaagtttcaggacagagtcacgattaccgcggacgaatccacgaacacagccttcatggaactgagcagcctgagatctgaggacacggccgtctattactgtgcgagaggtgatagggtatacggtgactacgggggggactttgactactggggccagggaaccctggtcaccgtctcctcagcctccaccaagggcccatcggtcttccccctggcaccctcctccaagagcacctctgggggcacagcggccctgggctgcctggtcaaggactacttccccgaaccggtgacggtgtcgtggaactcaggcgccctgaccagcggcgtgcacaccttcccggctgtcctacagtcctcaggactctactccctcagcagcgtggtgaccgtgccctccagcagcttgggcacccagacctacatctgcaacgtgaatcacaagcccagcaacaccaaggtggac

SEQ ID NO: 420 - DNA, 676 bp, Artificial Sequence
  Synthetic construct
gggagctctgggagacgagcccagcactggaagtcgccggtgtttccattcggtgatcatcactgaacacagaggactcaccatggagtttgggctgagctgggttttcctcgttgctctcttaagaggtgtccactgtcaggtgcagttggtggagtctgggggaggcgtggtcccgcctgggaggtccctgagactctcctgtgcagcctctggattcaccttcagctcatatcccatgcactgggtccgccaggctcccggcaagggactcgagtggctggcggttatctcatacgatggaaagagtgaaaactacgcagactccgtgaggggccgattcatcatctccagagacaattccaagaacaccctgtatctgcaaatgaacagcctaacacttgaagacacgtctgtctattactgtgcgaggacggcgggacctggcaactttgatccctggggccagggaaccctggtcatcgtctccgtggcctccaccaagggcccatcggtcttccccctggcaccctcctccaagagcacctctgggggcacagcggccctgggctgcctggtcaaggactacttccccgaaccggtgacggtgtcgtggaactcaggcgccctgaccagcggcgtgcacaccttcccggctgtcctacagtcctcagga

SEQ ID NO: 421 - DNA, 695 bp, Artificial Sequence
  Synthetic construct
gggcccacttaaacccagggctcccctccacagtgagtctccctcactgcccagctgggatctcagggcttcattttctgtcctccaccatcatggggtcaaccgccatcctcgccctcctcctggctgttctccaaggagtctgtgccgaggtgcagctggtgcagtctggagcagaggtgaaaaagccgggggagtctctgaagatctcctgtaagggttctggatacagtttttccagctactggatcgactgggtgcgccagatgcccgggaaaggcctggagtggatgggcagtatttatcctggtgactctgataccagatacagtccgtccttccaaggccaggtcaccatctcagccgacaagtccatcagcaccgcctacctgcagtggagcagtctgaaggcctcggacaccgccatgtatttttgtgcgagacgcagcgactacggtattaactcggagtggggcttctggggccagggaaccctggtcaccgtttcctcagcctccaccaagggcccatcggtcttccccctggcaccctcctccaagagcacctctgggggcacagcggccctgggctgcctggtcaaggactacttccccgaaccggtgacggtgtcgtggaactcaggcgccctgaccagcggcgtgcacaccttcccggctgtcctacagtcctcagga

SEQ ID NO: 422 - DNA, 782 bp, Artificial Sequence
  Synthetic construct
atgggactttctgagagtcctggacctcctgtgcaagaacatgaaacatctgtggttcttcctcctcctggtggcagctcccagatgggtcctgtcccagatgcaactgcaggagtcgggcccaggactggtgaagccttcacagaccctgtccctcacctgcactgtctctggtggctccatcagcagtggtagttactactggaactggatccggcagcccgccgggaagggactggagtggattgggcgtatgtatatcagtgggagcaccaactacagcccctccctcaagagtcgagtcaccatgtcagtagacacgtccaagaaccagttctccctgaagctgacctctgtgaccgccgcagacacggccgtttattactgtgcgagagagattagaatgtccccgtatagcagctcgtccccttttttcggttcgagatataactacatggacgtctggggcaaagggaccacggtcagcgtctcctcagcctccaccaagggcccatcggtcttccccctggcgccctgctccaggagcacctctgggggcacagcggccctgggctgcctggtcaaggactacttccccgaaccggtgacggtgtcgtggaactcaggcgccctgaccagcggcgtgcacaccttcccggctgtcctacagtcctcaggactctactccctcagcagcgtggtgaccgtgccctccagcagcttgggcacccagacctacacctgcaacgtgaatcacaagcccagcaacaccaaggtggaca

SEQ ID NO: 423 - DNA, 669 bp, Artificial Sequence
  Synthetic construct
gggggagcatcacataacaaccagattcctcctctaaagaggcccctgggagcacagctcatcaccatggactggacctggaggttcctctttgtggtggcagcagctacaggtgtccagtcccaggtccagttggtgcagtctggggctgaggtgaagaagcctgggtcctcggtgaaggtctcctgcaaggcttctggaggcatcttcaggagcaacgctatcagctgggtgcgacaggcccctggacaagggcttgagtggatgggagggatcatcgctatctttggaacagcaaagtacgcagagaagttccagggcagagtcacgattaccgcggacgaatccacgagcacagcttacatggagctgaacagcctgagatctgaggacacggccgtctattattgtgcgagacatagtggttatgttcccacgtcctactttgacaactggggccagggaaccctggtcactgtctcctcagcctccaccaagggcccatcggtcttccccctggcaccctcctccaagagcacctctgggggcacagcggccctgggctgcctggtcaaggactacttccccgaaccggtgacggtgtcgtggaactcaggcgccctgaccagcggcgtgcacaccttcccggctgtcctacagtcctcagga

SEQ ID NO: 424 - DNA, 801 bp, Artificial Sequence
  Synthetic construct
ggggtgccctgagagcatcacccagcaaccacatctgtcctctagagaatcccctgagagctccgttcctcaccatggactggacctggaggatcctcttcttggtggcagcagccacaggagcccactcccaggtgcagctggtgcagtctggggctgaggtgaagaagcctggggcctcagtgaaggtctcctgcaaggcttctggatacaccttcaccggccaacacatacactgggtgcgacaggcccctggacaagggctcgagtggatgggttggatcaaccctaatagtggtggcacaaactatgcacagaagtttcaggacagggtcaccatgaccagggacacgtccatcagtacagcctacatggaactgaacaggctgacatctgacgacacggccgtgtattactgtgcgagaggcgagcgacccgagtggtccccaaaaccttactcctactactactacatggacgtctggggcaaagggactacggtcaccgtctcctcagcctccaccaagggcccatcggtcttccccctggcgccctgctccaggagcacctctgggggcacagcggccctgggctgcctggtcaaggactacttccccgaaccggtgacggtgtcgtggaactcaggcgccctgaccagcggcgtgcacaccttcccggctgtcctacagtcctcaggactctactccctcagcagcgtggtgaccgtgccctccagcagcttgggcacccagacctacacctgcaacgtgaatcacaagcccagcaacaccaaggtggaca

SEQ ID NO: 425 - DNA, 695 bp, Artificial Sequence
  Synthetic construct
ggggagctctgagagaggagcccagccctgggattttcaggtgttttcatttggtgatcaggactgaacagagagaactcaccatggagtttgggctgagctggctttttcttgtggctattttaaaaggtgtccagtgtgaggtgcagctgttggagtctgggggaggcttggtacagcctggggggtccctgagactctcctgtgcagcctctggattcacctttagtagatatgccatgagctgggtccgccagactccagggaaggggctggagtgggtctcagctattagtggtagtggtggtagcacatactacgcagactccgtgaagggccggttcaccatctccagagacaattccaagaacacactgaatctgcaaatgaacagcctgagagccgaggacacggccgtatattactgtgcgaaagacttctatagtagcagcctccgccccgctgaaaacttccatcactggggccagggcaccctggtcaccgtctcctcagcctccaccaagggcccatcggtcttccccctggcaccctcctccaagagcacctctgggggcacagcggccctgggctgcctggtcaaggactacttccccgaaccggtgacggtgtcgtggaactcaggcgccctgaccagcggcgtgcacaccttcccggctgtcctacagtcctcagga

SEQ ID NO: 426 - DNA, 776 bp, Artificial Sequence
  Synthetic construct
gggagaagtcggcggtgtttccattcggtgatcagcactgaacacagaggactcaccatggagtttgggctgaactgggttttcctcgttgctcttttaagaggtgtccagtgtcaggtgcaactggtggagtctgggggaggcgtggtccagcctgggaggtccctgagactctcctgtgcagcctctggattcaccttcagtagctatggcatgcactgggtccgccaggctccaggcaaggggctggagtgggtggcagttatatcatatgatggaagtaataaatactatgcagactccgtgaagggccgattcaccatctccagagacaattccaagaacacgctgtatctgcaaatgaacagcctgagagctgaggacacggctgtgtattactgtgcgaaagactacagctatggttacttacgttactactactactacatggacgtctggggcaaagggaccacggtcaccgtctcctcagcctccaccaagggcccatcggtcttccccctggcgccctgctccaggagcacctccgagagcacagcggccctgggctgcctggtcaaggactacttccccgaaccggtgacggtgtcgtggaactcaggcgccctgaccagcggcgtgcacaccttcccggctgtcctacagtcctcaggactctattccctcagcagcgtggtgaccgtgccctccagcaacttcggcacccagacctacacctgcaacgtagatcacaagcccagcaacaccaaggtggacaa

SEQ ID NO: 427 - DNA, 796 bp, Artificial Sequence
  Synthetic construct
ggggagctctgggagaagagccccagccccagaattcccaggagtttccattcggtgatcagcactgaacacagaggactcaccatggagtttgggctgagctgggttttccttgttgctattataaaaggtgtccagtgtcaggtgcagctggtggagtctgggggagacttggtcaagcctggagggtccctgagactctcctgtgcagcctctggattcacgttcagtgactactacatgagctggatccgccaggctccagggaaggggctggagtgggtttcatacattagtagtagtggtagtaccatatactacggagactctgtgaagggccgattcaccatctccagggacaacgccaagaactcactgtatctgcaaatgaacagcctgagagccgaggacacggccgtgtattactgtgcgagagatcgatatgactacggtgactacgacttgtacttcgatctctggggccgtggcaccctggtcactgcctcctcagcctccaccaagggcccatcggtcttccccctggcgccctgctccaggagcacctctgggggcacagcggccctgggctgcctggtcaaggactacttccccgaaccggtgacggtgtcgtggaactcaggcgccctgaccagcggcgtgcacaccttcccggctgtcctacagtcctcaggactctactccctcagcagcgtggtgaccgtgccctccagcagcttgggcacccagacctacacctgcaacgtgaatcacaagcccagcaacaccaaggtggaca

SEQ ID NO: 428 - DNA, 760 bp, Artificial Sequence
  Synthetic construct
gggggagaggagcccagcactagaagtcggcggtgtttccattcggtgatcagcactgaacacagaggactcaccatggagtttgggctgagctgggttttcctcgttgctcttttaagaggtgtccagtgtcaggtgcagctggtggagtctgggggaggcgtggtccagcctgggaggtccctgagactctcctgtgcagcctctggattcaccttcagtagctatggcatgcactgggtccgccaggctccaggcaaggggctggagtgggtggcagttatatcatatgatggaagtaaaaaatactatgcagactccgtgaagggccgattcaccatctccagagacaattcgaagaacacgctgtatctgcagatgaacagcctgagagctgaggactcggctgtatattactgtgcgaaacgggcacttgactactggggccagggaaccctggtcaccgtctcctcagcttccaccaagggcccatcggtcttccccctggcgccctgctccaggagcacctccgagagcacagcggccctgggctgcctggtcaaggactacttccccgaaccggtgacggtgtcgtggaactcaggcgccctgaccagcggcgtgcacaccttcccggctgtcctacagtcctcaggactctattccctcagcagcgtggtgaccgtgccctccagcaacttcggcacccagacctacacctgcaacgtagatcacaagcccagcaacaccaaggtggaca

SEQ ID NO: 429 - DNA, 659 bp, Artificial Sequence
  Synthetic construct
agatggggacccaaaaaccacacccctccttgggagaatcccctagatcacagctcctcaccatggactggacctggaacatccttttcttggtggcagcagcaacaggtgcccactcccaggttcagctggtgcagtctggagctgaggtgaagaagcctggggcctcagtgaaggtctcctgcaaggcttctggttacacctttgccagctatggtttcagctgggtgcgacaggcccctggacaagggcttgagtggatgggatggatcagcgcttacaaaggtaacacaaactatgcacagaagctccagggcagagtcaccatgaccacagacacatccacgagcacagcctacatggagctgaggagcctgagatctgacgacacggccgtatattactgtgcgagagatcgttttggttcgtcgttttcagcctactggggccagggaaccctggtcaccgtctcctcagcctccaccaagggcccatcggtcttccccctggcaccctcctccaagagcacctctgggggcacagcggccctgggctgcctggtcaaggactacttccccgaaccggtgacggtgtcgtggaactcaggcgccctgaccagcggcgtgcacaccttcccggctgtcctacagtcctcagga

SEQ ID NO: 430 - DNA, 829 bp, Artificial Sequence
  Synthetic construct
gggggactcctgtgccccaccatggacacactttgctacacactcctgctgctgaccaccccttcctgtgagtgctgtggtcagggacttcctcagaagtgaaacatcagttgtctcctttgtgggcttcatcttcttatgtcttctccacaggggtcttgtcccaggtcaccttgaaggagtctggtcctgtgctggtgaaacccacagagaccctcacgctgacctgcaccgtctctgggttctcactcagcaatgctagaatgggtgtgagctggatccgtcagcccccagggaaggccctggagtggctagcacacattttttcgaatgacgaaaaatcctacaggacatccctgaagagcaggctcaccatctccaaggacacctccaaaagccaggtggtccttaccatgaccaacatggaccctgtggacacagccacatattactgtgcacggaaactggggtccgggggtgggtactactactacttcgctatggacgtctggggccaagggaccacggtcaccgtctcctcagcctccaccaagggcccatcggtcttccccctggcgccctgctccaggagcacctctgggggcacagcggccctgggctgcctggtcaaggactacttccccgaaccggtgacggtgtcgtggaactcaggcgccctgaccagcggcgtgcacaccttcccggctgtcctacagtcctcaggactctactccctcagcagcgtggtgaccgtgccctccagcagcttgggcacccagacctacacctgcaacgtgaatcacaagcccagcaacaccaaggtggacaa

SEQ ID NO: 431 - DNA, 788 bp, Artificial Sequence
  Synthetic construct
tgggggggagaggagcccagcactagaagtcggcggtgtttccattcggtgatcagcactgaacacagaggactcaccatggagtttgggctgagctgggttttcctcgttgctcttttaagaggtgtccagtgtcaggtgcagctggtggagtctgggggaggcgtggtccagcctgggaggtccctgagactctcctgtgcagcgtctggattcatcttcagtagctatggcatgcactgggtccgccaggctccaggcaaggggctggagtgggtggcagttgtatggtatgatggaagtaataaatactatgcagactccgtgaagggccgattcaccatctccagagacaattccaagaacacactgtatctgcaaatgaacagcctgagagccgaggacacggctgtatattactgtgcgagagatcgagtggttcggggaggtccccaggtaggtgcgcactggggccagggaaccctggtcaccgtctcctcagcctccaccaagggcccatcggtcttccccctggcaccctcctccaagagcacctctgggggcacagcggccctgggctgcctggtcaaggactacttccccgaaccggtgacggtgtcgtggaactcaggcgccctgaccagcggcgtgcacaccttcccggctgtcctacagtcctcaggactctactccctcagcagcgtggtgaccgtgccctccagcagcttgggcacccagacctacacctgcaacgtgaatcacaagcccagcaacaccaaggtggacaa

SEQ ID NO: 432 - DNA, 795 bp, Artificial Sequence
  Synthetic construct
gggagctctcagagaggtgccttagccctggattccaaggcatttccacttggtgatcagcactgaacacagaggactcaccatggagttggggctgtactgggttttccttgttgctattttagaaggtgtccagtgtgaggtgcagctggtggagtctgggggaggcttggtacagcctggggggtccctgagactctcctgtgcagcctctggattcaccttcaatacctatagcatgaactgggtccgccaggctccagggaaggggctggagtgggtttcatacattagttatagtagtagtaccatatactatgcagactctgtgaagggccgattcaccatctccagagacaatgccaagaactccctgtatctgcaaatgcacagcctgagaggcgaggacacggctgtgtattactgtgcgagaaggaggcattactatgatagtagtgggcatgcttatgatatctggggccaagggacaatggtcaccgtctcttcagcctccaccaagggcccatcggtcttccccctggcgccctgctccaggagcacctctgggggcacagcggccctgggctgcctggtcaaggactacttccccgaaccggtgacggtgtcgtggaactcaggcgccctgaccagcggcgtgcacaccttcccggctgtcctacagtcctcaggactctactccctcagcagcgtggtgaccgtgccctccagcagcttgggcacccagacctacacctgcaacgtgaatcacaagcccagcaacaccaaggtggacaa

SEQ ID NO: 433 - DNA, 696 bp, Artificial Sequence
  Synthetic construct
tatctggggacccaaaaaccacacccctccttgggagaatcccctagatcacagctcctcaccatggactggacctggagcatccttttcttggtggcagcagcaacaggtgcccactcccaggttcagctggtgcagtctggacctgaggtgaagaagcctgggacctcagtgaaggtctcctgcaaggcttctggttacacctttaccagctatggtatcagctgggtgcgacaggcccctggacaagggcttgagtggatggggtggatcagcgcttacgatggtaatacaaaatatgcacagaaactccagggcagagtcactatgaccacagacacatccacgagcacagcctacatggacctgaggagcctgatatctgacgacacggccgtgtattactgtgcgagaacgtatcaatctaggcccttagaactacgatatttcgactggttacccggggggcactttgactactggggccagggaaccctggtcaccgtctcctcagcctccaccaagggcccatcggtcttccccctggcaccctcctccaagagcacctctgggggcacagcggccctgggctgcctggtcaaggactacttccccgaaccggtgacggtgtcgtggaactcaggcgccctgaccagcggcgtgcacaccttcccggctgtcctacagtcctcagga

SEQ ID NO: 434 - DNA, 806 bp, Artificial Sequence
  Synthetic construct
gggggaagagccccagccccagaattcccaggagtttccattcggttatcagcactgaacacagaggactcaccatggagtttgggctgagctgggttttccttgttgctattataaaaggtgtccagtgtcaggtgcagctggtggagtctgggggaggcttcgtcaagcctggagggtccctgagactctcctgtgcagcctctggattcaccttcagtgactactacatgacctggatccgcgaggctccagggaaggggctggagtgggtttcatacattggtagtagtggtagtcccatatactacgcagactctgtgaagggccgattcaccatctccagggacaacgccaagaactcactgtatctgcaaatgaacagcctgagagccgaggacacggccgtgtattactgtgcgagagaacagggtgtggactacgctgaatacgatcaggattatttcgactttgagggaatggactactggggccagggagccctggtcaccgtctcctcagcctccaccaagggcccatcggtcttccccctggcgccctgctccaggagcacctccgagagcacagcggccctgggctgcctggtcaaggactacttccccgaaccggtgacggtgtcgtggaactcaggcgccctgaccagcggcgtgcacaccttcccggctgtcctacagtcctcaggactctattccctcagcagcgtggtgaccgtgccctccagcaacttcggcacccagacctacacctgcaacgtagatcacaagcccagcaacaccaaggtggac

SEQ ID NO: 435 - DNA, 705 bp, Artificial Sequence
  Synthetic construct
gggctctgtgtttgcaggtgtccagtgtcaggtgcagctggtggagtctgggggaggcttcgtcaagcctggagggtccctgagactctcctgtgcagcctctggattcaccttcagtgactactacatgacctggatccgcgaggctccagggaaggggctggagtgggtttcatacattggtagtagtggtagtcccatatactacgcagactctgtgaagggccgattcaccatctccagggacaacgccaagaactcactgtatctgcaaatgaacagcctgagagccgaggacacggccgtgtattactgtgcgagagaacagggtgtggactacgctgaatacgatcaggattatttcgactttgagggaatggactactggggccagggagccctggtcaccgtctcctcagcctccaccaagggcccatcggtcttccccctggcgccctgctccaggagcacctctgggggcacagcggccctgggctgcctggtcaaggactacttccccgaaccggtgacggtgtcgtggaactcaggcgccctgaccagcggcgtgcacaccttcccggctgtcctacagtcctcaggactctactccctcagcagcgtggtgaccgtgccctccagcagcttgggcacccagacctacacctgcaacgtgaatcacaagcccagcaacaccaaggtggacaa

SEQ ID NO: 436 - DNA, 818 bp, Artificial Sequence
  Synthetic construct
ggggagctctgggagaggagccccagccctgagattcccaggtgtttccattcggtgatcagcactgaacacagagaacgcaccatggagtttggactgagctgggttttccttgttgctattttaaaaggtgtccagtgtgaagtgcagctggtggagtctgggggagtcgtggtacagcctggggggtccctgagactctcctgtgcagcctctggattcacctttgatgattataccatgcactgggtccgtcaagctccggggaagggtctggagtgggtctctcttattagttgggatggtggtagcacatactatgcagactctgtgaagggccgattcaccatctccagagacaacagcaaaaactccctgtatctgcaaatgaacagtctgagaactgaggacaccgccttgtattactgtgcaaaagatcgtgggtcctttaggagcagtggctggtacgagtggcactactactacggtatggacgtctggggccaagggaccacggtcaccgtctcctcagcttccaccaagggcccatcggtcttccccctggcgccctgctccaggagcacctccgagagcacagcggccctgggctgcctggtcaaggactacttccccgaaccggtgacggtgtcgtggaactcaggcgccctgaccagcggcgtgcacaccttcccggctgtcctacagtcctcaggactctactccctcagcagcgtggtgaccgtgccctccagcagcttgggcacccagacctacacctgcaacgtgaatcacaagcccagcaacaccaaggtggacaa

SEQ ID NO: 437 - DNA, 751 bp, Artificial Sequence
  Synthetic construct
ggggacccaaaaaccacacccctccttgggagaatcccctagatcacagctcctcaccatggactggacctggagcatccttttcttggtggcagcagcaacaggtaacggactccccagtcccagggctgagagagaaaaaccaggccagtcatgtgagacttcacccactcctgtgtcctctccacaggtgcccactcccaggttcagctggtgcagtctggagctgaggtgaagaagcctggggcctcagtgaaggtctcctgcaaggtttctggttacacctttaccagctatggtatcagctgggtgcgacaggcccctggacaagggcttgagtggatgggatggatcaccccttacaatggtaacacaaactatgcacagaagctccagggcagagtcaccatgaccacagacacatccacgagcacagcctacatggagctgaggagcctgagatctgacgacacggccgtgtattactgtgcgagagataggggtgcccctgggtactggggccagggaaccctggtcaccgtctcctcagcctccaccaagggcccatcggtcttccccctggcaccctcctccaagagcacctctgggggcacagcggccctgggctgcctggtcaaggactacttccccgaaccggtgacggtgtcgtggaactcaggcgccctgaccagcggcgtgcacaccttcccggctgtcctacagtcctcaggactctactccctcagcagcg

SEQ ID NO: 438 - DNA, 757 bp, Artificial Sequence
  Synthetic construct
agatggggatcacataacaaccagattcctcctctaaagaagcccctgggagcacagctcatcaccatggactggacctggaggttcctctttgtggtggcagcagctacaggtgtccagtcccaggtccagctggtgcagtctggggctgaggtgaagaagcctgggtcctcggtgaaggtctcctgcaaggcttctggaggcaccttcagcagctatgctatcagctgggtgcgacaggcccctggacaagggcttgagtggatgggagggatcatccctatctttggtacagcaaactacgcacagaagttccagggcagagtcacgattaccgcggacgaatccacgagcacagcctacatggagctgagcagcctgagatctgaggacacggccgtgtattactgtgcgagagatctggaggctctacaaagtattacgatttttggagtggttaggtacaactggttcgacccctggggccagggaaccctggtcaccgtctcctcagcctccaccaagggcccatcggtcttccccctggcgccctgctccaggagcacctccgagagcacagcggccctgggctgcctggtcaaggactacttccccgaaccggtgacggtgtcgtggaactcaggcgccctgaccagcggcgtgcacaccttcccggctgtcctacagtcctcaggactctactccctcagcagcgtggtgaccgtgccctccagcagcttgggcacccagacctaca

SEQ ID NO: 439 - DNA, 687 bp, Artificial Sequence
  Synthetic construct
ggggagctctgggagaagagccccagccccagaattcccaggagtttccattcggtgatcagcactgaacacagaggactcaccatggagtttgggctgagctgggttttccttgttgctattataaaaggtgtccactgtcagttgcagctggtggagtctgggggaggcttggtcaagcctggagggtccctgagactctcctgtgcagcctctggattcaccttcagtgactactacatgagctggatccgccaggctccagggaaggggctggagtgggtttcatacattagtagtagtggtagtaccatatactacgcagactctgtgaagggccgattcaccatctccagggacaacgccaagaactcactgtatctgcaaatgaacagcctgagagccgaggacacggccgtgtattactgtgccgggggggtggttattactacgggcggtgcttttgatatctggggccaagggacaatggtcaccgtctcttcagcctccaccaagggcccatcggtcttccccctggcaccctcctccaagagcacctctgggggcacagcggccctgggctgcctggtcaaggactacttccccgaaccggtgacggtgtcgtggaactcaggcgccctgaccagcggcgtgcacaccttcccggctgtcctacagtcctcagga

SEQ ID NO: 440 - DNA, 745 bp, Artificial Sequence
  Synthetic construct
gccctctactgatgaaaaccagcccagccctgaccctgcagctctgggagaggagcccagcactagaagtcggcggtgtttccattcggtgatcagcactgaacacagaggactcaccatggagtttgggctgagctgggttttcctcgttgctcttttaagaggtgtccagtgtcaggtgcagctggtggagtctgggggaggcgtggtccagcctgggaggtccctgagactctcctgtgcagcgtctggattcaccttcagtagctatggcatgcactgggtccgccaggctccaggcaaggggctggagtgggtggcagttatatggtatgatggaagtaataaatactatgcagactccgtgaagggccgattcaccatctccagagacaattccaagaacacgctgtatctgcaaatgaacagcctgagagccgaggacacggctgtgtattactgtgcgagagccttatattactatgatagtagtggttatcagaagttggcgcactggtacttcgatctctggggccgtggcaccctggtcactgtctcctcagcctccaccaagggcccatcggtcttccccctggcaccctcctccaagagcacctctgggggcacagcggccctgggctgcctggtcaaggactacttccccgaaccggtgacggtgtcgtggaactcaggcgccctgaccagcggcgtgcacaccttcccggctgtcctacagtcctcagga

SEQ ID NO: 441 - DNA, 656 bp, Artificial Sequence
  Synthetic construct
ggggacatggaaaatactttctgagagtcctggacctcctgtgcaagaacatgaaacatctgtggttcttcctcctcctggtggcagctcccagatgggtcctgtcccaggtgcagctgcaggagtcgggcccaggactggtgaagccttcacagaccctgtccctcacctgcactgtctctggtggctccatcagcagtggtagttactactggagctggatccggcagcccgccgggaagggactggagtggattgggcgtatctataccagtgggagcaccaactacaacccctccctcaagagtcgagtcaccatatcagtagacacgtccaagaaccagttctccctgaagctgagctctgtgaccgccgcagacacggccgtgtattactgtgcgagaggcccatattacggggcgaggccgccgatggacgtctggggcaaagggaccacggtcaccgtctcctcagcttccaccaagggcccatcggtcttccccctggcgccctgctccaggagcacctctgggggcacagcggccctgggctgcctggtcaaggactacttccccgaaccggtgacggtgtcgtggaactcaggcgccctgaccagcggcgtgcacaccttcccggctgtcctacagtcctcagga

SEQ ID NO: 442 - DNA, 701 bp, Artificial Sequence
  Synthetic construct
ggggagtgactcctgtgccccaccatggacacactttgctccacgctcctgctgctgaccatcccttcatgggtcttgtcccagatcaccttgaaggagtctggtcctacgctggtgaaacccacacagaccctcacgctgacctgcaccttctctgggttctcactcagcactagtggagtgggtgtgggctggatccgtcagcccccaggaaaggccctggagtggcttgcactcatttattggaatgatgataagcgctacagcccatctctgaagagcaggctcaccatcaccaaggacacctccaaaaaccaggtggtccttacaatgaccaacatggaccctgtggacacagccacatattactgtgcacacgtaaatcctagtagaaccatcctgtcccgctggggtcgcgggccgtactactttgactactggggccagggaaccctggtcaccgtctcctcagcttccaccaagggcccatcggtcttccccctggcgccctgctccaggagcacctctgggggcacagcggccctgggctgcctggtcaaggactacttccccgaaccggtgacggtgtcgtggaactcaggcgctctgaccagcggcgtgcacaccttcccggctgtcctacagtcctcaggactctactccctcagcagcgtggtgaccgtgaccgccagaaacttccc

SEQ ID NO: 443 - DNA, 665 bp, Artificial Sequence
  Synthetic construct
ggactttctgagagtcctggacctcctgtgcaagaacatgaaacatctgtggttcttccttctcctggtggcagctcccagatgggtcctgtcccaggtgcagctgcaggagtcgggcccaggactggtgaagccttcggagaccctgtccctcacctgcactgtctctggtggctccatcagtagttactactggagctggatccggcagccccctaggaagggactggagtggattgggtatatctattacagtgggagcaccaactacaacccctccctcaagagtcgagtcaccatatcagtagacacgtccaagaaccagttctccctgaagctgagctctgtgaccgctgcggacacggccgtgtattactgtgcgagacatatccctgcgagggcagcagctggccagaggcgtcggtactactactacggtatggacgtctggggccaagggaccacggtcaccgtctcctcagcttccaccaagggcccatcggtcttccccctggcgccctgctccaggagcacctctgggggcacagcggccctgggctgcctggtcaaggactacttccccgaaccggtgacggtgtcgtggaactcaggcgccctgaccagcggcgtgcacaccttcccggctgtcctacagtcctcaggac

SEQ ID NO: 444 - DNA, 693 bp, Artificial Sequence
  Synthetic construct
tctggggatactttctgagagtcctggacctcctgcacaagaacatgaaacacctgtggttcttcctcctcctggtggcagctcccagatgggtcctgtcccaggtgcagctgcaggagtcgggcccaggactggtgaagccttcggagaccctgtccctcatatgcactgtctctggtggctccatcagtagttactactggacctggatccggcagcccgccgggaagggactggagtggattgggcgtatctataccagtgggagcaccaactacaacccctccctcaagagtcgagtcaccatgtcagtagacacgtccaagaaccagttctccctgaagctgagctctgtgaccgccgcggacacggccgtgtattactgtgcgggagcgcattgtagtagtaccagctgctattcgggtttatttggtgcttttgatatctggggccaagggacaatggtcaccgtctcttcagcctccaccaagggcccatcggtcttccccctggcaccctcctccaagagcacctctgggggcacagcggccctgggctgcctggtcaaggactacttccccgaaccggtgacggtgtcgtggaactcaggcgccctgaccagcggcgtgcacaccttcccggctgtcctacagtcctcaggactctactccctcagcagcgtggtgaccgtgc

SEQ ID NO: 445 - DNA, 674 bp, Artificial Sequence
  Synthetic construct
ggggagagctctggagaagagctgctcagttaggacccagagggaaccatggaaaccccagcgcagcttctcttcctcctgctactctggctcccagatattaccggagaagttgtcttgacacagtctccaggcatcctgtctgcgtccccagggggcagagtctccctctcctgcaagtccagtcacggtcttagtagaaacgaattagcttggtatcaacagcggcgcggccagtctcccaggctcctcgtctatgatgcctccacaagggccaccggcatcccggacaggttcagaggcagcgggtctgggacagacttcaatctcactgtcaccagactggagactgaagattttgcaatttattactgtcagcagtatggcacaacaccctacactttcggccctgggaccaaagtggatgtcaaacgaactgtggctgcaccatctgtcttcatcttcccgccatctgatgagcagttgaaatctggaactgcctctgttgtgtgcctgctgaataacttctatcccagagaggccaaagtacagtggaaggtggataacgccctccaatcgggtaactcccaggagagtgtcacagagcaggacagcaaggacagcacctacagcctcagcagcaccctgacgctgagcaaagcagactacgagaa

SEQ ID NO: 446 - DNA, 726 bp, Artificial Sequence
  Synthetic construct
ggggcatgtccctcccagccgccctgcagtccagagcccacatcaacgcctgggtcagagctctggagaagagctgctcagttaggacccagagggaaccatggaaaccccagcgcagcttctcttcctcctgctactctggctcccagatattaccggcgacgttgtcttgacacagtctccaggcaccctgtctgtgtccccagggggcagagtctccctctcctgcaggtccagtcacggtcttagcagaaacgaattaggttggtatcaacaccggcgcggccagtctcccaggctcctcgtctatgatgcctcaacaagggccaccggcatcccggacaggttcagcggcagcgggtctgggacagacttcaatctcactatcagcagactggagactgaagattttgcaatttattactgtcaccagtatggcacaacaccctacactttcggccctgggaccaaagtggatgtcaaacgaactgtggctgcaccatctgtcttcatcttcccgccatctgatgagcagttgaaatctggaactgcctctgttgtgtgcctgctgaataacttctatcccagagaggccaaagtacagtggaaggtggataacgccctccaatcgggtaactcccaggagagtgtcacagagcaggacagcaaggacagcacctacagcctcagcagcaccctgacgctgagcaaagcagactacgagaa

SEQ ID NO: 447 - DNA, 694 bp, Artificial Sequence
  Synthetic construct
ctctagtttcttatatggggaattaggactcctcaggtcaccttctcacaatgaggctccttgctcagcttctggggctgctgatgctctgggtccctggatgtagtgcggaaattgtgatgacccagagtcctctctcttcatctgttacccttgggcagtcggcctccatctcctgtaagtccagtcacagtctcgttgccagcagtggaatcgtctacttaaattggcttcaccagaggccgggccagcctccaagactcctcatttttaggagtgctgaccggttccctggggtcccagagagatttagcggcagtgggtccgcgacagcgacaaacttcacactaaaaatcagtagggtggaagctgaggatgtcggaatttattactgcgtacaaacttcacaatttcccttcacttctggcacagggaccaggctggacatcaaacgaactgtggctgcaccatctgtcttcatcttcccgccatctgatgagcagttgaaatctggaactgcctctgttgtgtgcctgctgaataacttctatcccagagaggccaaagtacagtggaaggtggataacgccctccaatcgggtaactcccaggagagtgtcacagagcaggacagcaaggacagcacctacagcctcagcagcaccctgacgctgagcaaagcagactacgagaa

SEQ ID NO: 448 - DNA, 664 bp, Artificial Sequence
  Synthetic construct
agatggggaggagtcagacccagtcaggacacagcatggacatgagggtccccgctcagctcctggggctcctgctgctctggctcccaggtgccaactgttacatccagatgacccagtctccctccaacctgtctgcgtctgtgggagacagagtcagtctcaattgccgggccagtcatgatattaagggttggttggcctggtatcagcagagacctgggagagtccctagactcctgattcagaaagcgtctgatctggaacccggaatttcatcaaggttcagtggcagtggatatgggacacagttcactctcgaaataagtagcctccagcgtgaagatgtcgcaacttattactgtcaacaatatgccggcgaaccccccacttttggcccggggaccaggctggacatcgaacgaactgtggctgcaccatctgtcttcatcttcccgccatctgatgagcagttgaaatctggaactgcctctgttgtgtgcctgctgaataacttctatcccagagaggccaaagtacagtggaaggtggataacgccctccaatcgggtaactcccaggagagtgtcacagagcaggacagcaaggacagcacctacagcctcagcagcaccctgacgctgagcaaagcagactacgagaa

SEQ ID NO: 449 - DNA, 688 bp, Artificial Sequence
  Synthetic construct
agatgggggagctacaacaggcaggcaggggcagcaagatggtgttgcagacccaggtcttcatttctctgttgctctggatctctgtgactacaggtgcctccggggacatcgtgatgacccagtctccagactccctggctgtgtctctgggcgagagggccaccatcaactgcaagtccagccggactattttatacagctccaacaataagaactacttagcttggtaccgccagaaaccaggacagcctcctactttgctcatttactgggcatctacccgggcatccggggtccctgaccgattcagtggcagcgggtctgggacagaattcactctcaccatcagcagcctgcaggctgaagatgtggcagtttattactgtcagcaattttttgctactccgctcactttcggcggagggaccaaggtggagatcaaacgaactgtggctgcaccatctgtcttcatcttcccgccatctgatgagcagttgaaatctggaactgcctctgttgtgtgcctgctgaataacttctatcccagagaggccaaagtacagtggaaggtggataacgccctccaatcgggtaactcccaggagagtgtcacagagcaggacagcaaggacagcacctacagcctcagcagcaccctgacgctgagcaaagcagactacgagaa

SEQ ID NO: 450 - DNA, 669 bp, Artificial Sequence
  Synthetic construct
gatgtgcaggaggcagtcccaaccagggcacagcatggacatgagggtccctgctcagctcctggggctcctgctgctctggctctcagttgccagatgtgacatccaaatgacccagtctccatcctccctgtctgcatctgtaggagacacagtcatcatcacttgccaggcgagtcaggccattggcaattatttgagttggtatcaacaaaaatcgggaggcgcccctaaagtcctaatctacgatgtctccaatttggagccaggggtcccatcacgtttcagtggaagttcatctgggacaagttttactttaaccatccatggcctgcagcctgaagacattgcaacatattactgtcaacaatatgataacattcctcccagactcactttcggcggggggaccaaggtggaactcaaacgaactgtggctgcaccatctgtcttcatcttcccgccatctgatgagcagttgaaatctggaactgcctctgttgtgtgcctgctgaataacttctatcccagagaggccaaagtacagtggaaggtggataacgccctccaatcgggtaactcccaggagagtgtcacagagcaggacagcaaggacagcacctacagcctcagcagcaccctgacgctgagcaaagcagactacgagaa

SEQ ID NO: 451 - DNA, 682 bp, Artificial Sequence
  Synthetic construct
ggggataggctggtcacacttcttgcaggagtcagacccactcaggacacagcatggacatgagggtccccgctcagctcctggggcttctgctgctctggctcccaggtgccagatgtgccgtccaggtgacccagtctccgtcctccctctctgcatctgtcggagacaaagtcaccatcacttgccggacaagtgaagacattggcgattttttagcctggtatcagcacaagcccgggactgttcctagactcctgatgtaccgtgcctccagattgggacaaggggtcccatcaaggttcagcgcctctgcatctgggacaaagttcactctcaccatcagcagcctgcagcctgaagattctgcgacctattactgtcaacaatttaaacgtcttgagttcgctttcggccctgggtccagggtgaacatcaaacgaactgtggctgcaccatctgtcttcatcttcccgccatctgatgagcagttgaaatctggaactgcctctgttgtgtgcctgctgaataacttctatcccagagaggccaaagtacagtggaaggtggataacgccctccaatcgggtaactcccaggagagtgtcacagagcaggacagcaaggacagcacctacagcctcagcagcaccctgacgctgagcaaagcagactacgagaa

SEQ ID NO: 452 - DNA, 687 bp, Artificial Sequence
  Synthetic construct
tggggaggctggtcgcaccctgtgcaggagtcagccgcaaccaggacacagcatggacatgagggtccctgctcagctcctggggctcctgctgctctggctctcaggtgccagatgtgacgtccaaatgacccaatctccttcctccctgtctgcttctgtgggagacagcgtcaccatcacttgccaggcgagtcaggacatcggaaattatttgaattggtatcatcagaaacatgggaaagcccctaaagtcctggtctacgacgcctccaatttggagacaggggtcccctcaaggttccgtggaagtggatctgggacatctttcagtttcaccatcactgacctgcagcctgacgatgtgggaacatattattgtcaacaatatgataatctccctcccaggctcactttcgccgcagggaccaaggtggagataaaacgaactgtggctgcaccatctgtcttcatcttcccgccatctgatgagcagttgaaatctggaactgcctctgttgtgtgcctgctgaataacttctatcccagagaggccaaagtacagtggaaggtggataacgccctccaatcgggtaactcccaggagagtgtcacagagcaggacagcaaggacagcacctacagcctcagcagcaccctgacgctgagcaaagcagactacgagaa

SEQ ID NO: 453 - DNA, 691 bp, Artificial Sequence
  Synthetic construct
tgcatgtttctgttcagtttcttatatgggggagtcagtcccaaccaggacacagcatggacatgagggtccctgctcagctcctggggctcctgctgctctggctctcaggtgtcagaggtgacatccagatgacccagtctccatcctccctgactgcttctgtaggagacagtgtcaccatctcttgccaggcgagtcagtccattgccaattctttgaattggtatcagcaaaaaccagggcaggcccctaaggtcctgatctacgatgcttccaagttggagatcggagtcccgccacgcttcagtgggagtgggtctgggacaatgtttactttaagcataagtggcttacagcctgaagacattggaacatattactgtcaacaatatgacaatatacctcccagactgtccttcggcggggggaccaaggtggagctcaaacgaactgtggctgcaccatctgtcttcatcttcccgccatctgatgagcagttgaaatctggaactgcctctgttgtgtgcctgctgaataacttctatcccagagaggccaaagtacagtggaaggtggataacgccctccaatcgggtaactcccaggagagtgtcacagagcaggacagcaaggacagcacctacagcctcagcagcaccctgacgctgagcaaagcagactacgagaa

SEQ ID NO: 454 - DNA, 650 bp, Artificial Sequence
  Synthetic construct
gggtgcaggagtcagtcccagtcaggacacagcatggacatgagggtccccgctcagctcctggggctcctgctgctctggctcccaggtgccagatgtgacctccaattgacccagtctccatctttcctgtcggcctctgtgggggacagagtcaccatcacttgccgggccagtgaggccattcacaattatttagcctggtatcaacaaaaaccagggaaagcccctaacctcctgatctatggtgcatccactttgcagagtggtgtcccatcacgattccgcggcagtggctctgggacagaattcactctcacaatcagcagcctgcagcctgaagattttgcaacttattactgtcaacaacttggcagttttggccaggggaccaagctggatatcaaacgaactgtggctgcaccatctgtcttcatcttcccgccatctgatgagcagttgaaatctggaactgcctctgttgtgtgcctgctgaataacttctatcccagagaggccaaagtacagtggaaggtggataacgccctccaatcgggtaactcccaggagagtgtcacagagcaggacagcaaggacagcacctacagcctcagcagcaccctgacgctgagcaaagcagactacgagaa

SEQ ID NO: 455 - DNA, 713 bp, Artificial Sequence
  Synthetic construct
gggggtttggattttataaacgggccgtttgcattgtgaactgagctacaacaggcaggcaggggcagcaagatggtgttgcagacccaggtcatcatttctctgttgctctggatctctggtgcctccggggacatcgtgatgacgcagtctccagactccctgagtgtgtctctgggcgagagggccaccatcaactgcaagtccagccggactgttttatacaactccgacaacaagaactatttagcttggtaccaacaaaaaccaggacagcctcctaggctcctcatttactgggcatctacccggggatccggggtccctgaccgattcagtggcagcgggtctgggacagatttcactctaaccattaacagcctgcaggctgaggatgtggctatttattactgtcagcaatttttcactactccgctcactttcggcggagggaccagggtggaaatcagacgaactgtggctgcaccatctgtcttcatcttcccgccatctgatgagcagttgaaatctggaactgcctctgttgtgtgcctgctgaataacttctatcccagagaggccaaagtacagtggaaggtggataacgccctccaatcgggtaactcccaggagagtgtcacagagcaggacagcaaggacagcacctacagcctcagcagcaccctgacgctgagcaaagcagactacgagaa

SEQ ID NO: 456 - DNA, 721 bp, Artificial Sequence
  Synthetic construct
atgttgctcgtggaagctttcttatatgggcaatgttgccgatacccagtttcttatatgggagtcagtcccaaccaggacacagcatggacatgagggtccctgctcagctcctggggctcctgctgctctggctctcaggtgccagaggtgacatccagatgacccagtctccatcctccctgtctgcatctgtaggagacagagtcaccatcacttgccaggcgagtcaggccattggcaattctttgaattggtatcagcagaaaccagggagagcccctaaggtcctgatctacgatacttccaatttggaaacaggagtcccagcacggttcagtggaagtggatctgggacaacttttactttcaccatcgttgccctgcagcctgaagactttgcaacatatttctgtcaacagtatgataatctccctcccagactctccttcggcggggggaccaaggtggagctcaaccgaactgtggctgcaccatctgtcttcatcttcccgccatctgatgagcagttgaaatctggaactgcctctgttgtgtgcctgctgaataacttctatcccagagaggccaaagtacagtggaaggtggataacgccctccaatcgggtaactcccaggagagtgtcacagagcaggacagcaaggacagcacctacagcctcagcagcaccctgacgctgagcaaagcagactacgagaa

SEQ ID NO: 457 - DNA, 689 bp, Artificial Sequence
  Synthetic construct
tcgatgggggctggggtctcaggaggcagcactctcgggacgtctccaccatggcctgggctctgctcctcctcagcctcctcactcagggcacaggatcctgggctcagtctgccctgactcagcctcactcagtgtccgggtctcctggacagtcagtcaccatcacctgcactggaaccagcaatagtcttggtgataataattttgtctcctggtaccaacaacaaccggacaaggcccccaaactcctgatctatgatgtcactaagcggccctcaggggtccctgatcgcttctctggctccaagtctgccaacacggcctccctgaccatctctgggctccaggctgaggatgagggtgattattactgctgctcatatgctgacagttatctttccctttatgtcttcggacctgggacctcggtcaccgtcctacgtcagcccaaggccaaccccactgtcactctgttcccgccctcctctgaggagctccaagccaacaaggccacactagtgtgtctgatcagtgacttctacccgggagctgtgacagtggcctggaaggcagatggcagccccgtcaaggcgggagtggagaccaccaaaccctccaaacagagcaacaacaagtacgcggccagcagctacctgagcctgacgcccgagcagtggaagtcccac

SEQ ID NO: 458 - DNA, 903 bp, Artificial Sequence
  Synthetic construct
ggggctttcagcagtttgtagttttagagcttctaagttgacttctgtcttttctattcatacaattacacattctgtgatgatatttttggctcttgatttacattgggtactttcacaacccactgctcatgaaatttgcttttgtactcactggttgtttttgcataggcccctccaggccacgaccagctgtttggattttataaacgggccgtttgcattgtgaactgagctacaacaggcaggcaggggcagcaagatggtgttgcagacccaggtcatcatttctctgttgctctggatctctggtgcctccggggacatcgtgatgacgcagtctccagactccctgagtgtgtctctgggcgagagggccaccatcaactgcaagtccagccggactgttttatacaactccgacaataagaactacttagcttggtaccaacagaaaccaggacagcctcctaggctcctcatttactgggcatctacccggggatccggggtccctgaccgattcagtggcagcgggtctgggacagatttcactctaaccattaacagcctgcaggctgaggatgtggctatgtattactgtcagcaatttttcactactccgctcactttcggcggagggaccaaggtggagatcagacgaactgtggctgcaccatctgtcttcatcttcccgccatctgatgagcagttgaaatctggaactgcctctgttgtgtgcctgctgaataacttctatcccagagaggccaaagtacagtggaaggtggataacgccctccaatcgggtaactcccaggagagtgtcacagagcaggacagcaaggacagcacctacagcctcagcagcaccctgacgctgagcaaagcagactacgagaa

SEQ ID NO: 459 - DNA, 680 bp, Artificial Sequence
  Synthetic construct
ggggaggctgatcacaccctgtgcaggagtcagacccagtcaggacacagcatggacatgagggtccccgctcagctcctggggctcctgctgctctggttcccaggttccagatgcgacatccagatgacccagactccatcttccgtgtctgctactgttggaggcagcgtcaccatcacttgtcgggcgagccaagatattaacaagtggttagcctggtatcaacaaagaccagggaaagcccctgagctcctgatctattcttcttccactctacagaggggggtcccgtcaaggttcagcggcagtggatctgggacaactttcaccctcacaatcagtagcctgcaacctgaagattttgcaacctattattgtcaacaggcttacagttcccctcgaacttttggccaggggaccaagctggagatcaaacgaactgtggctgcaccatctgtcttcatcttcccgccatctgatgagcagttgaaatctggaactgcctctgttgtgtgcctgctgaataacttctatcccagagaggccaaagtacagtggaaggtggataacgccctccaatcgggtaactcccaggagagtgtcacagagcaggacagcaaggacagcacctacagcctcagcagcaccctgacgctgagcaaagcagactacgagaa

SEQ ID NO: 460 - DNA, 764 bp, Artificial Sequence
  Synthetic construct
ggggacagctcctcctgcagcagcccctgactgctgatttgcatcacgggccgctctttccagcaaggggataagagaggcctggaagaacctgcccagcctgggcctcaggaagcagcatcggaggtgcctcagccatggcatggatccctctcttcctcggcgtccttgctcactgcacaggattcgtggcctcctttgagttgactcagccaccctcagtgtccgtgtccccaggacagacagccaccttcacctgttcttcagataacctgggcgccaaatatatttcctggtatcaacagaagacaggccagtcccctaaactggtcatgtataaaaatgacaggcggccctcagggacccctgaccgattttctggctccaattctggagacacagcctctctgaccatcaccgggacccaagtcatggatgaggctgattattactgtcaggcgtgggacgacggttctccttgggggatattcggcggagggaccacgctgaccgtcctaagtcagcccaaggctgccccctcggtcactctgttcccgccctcctctgaggagcttcaagccaacaaggccacactggtgtgtctcataagtgacttctacccgggagccgtgacagtggcctggaaggcagatagcagccccgtcaaggcgggagtggagaccaccacaccctccaaacaaagcaacaacaagtacgcggccagcagctatctgagcctgacgcctgagcagtggaagtcccac

SEQ ID NO: 461 - DNA, 714 bp, Artificial Sequence
  Synthetic construct
ggggggataagacagggctgggggcaggcccagtgctggggtctcaggaggcagcactctcgggacgtctccaccatggcctgggctctgctcctcctcaccctcctcactcagggcacaggatcctggactcagtctgccctgactcaacctcgctcagtgtccgcgtctcctggacagtcaatcaccgtctcctgcactggaaccagcagtaatgttggttcttttgactctgtctcctggtaccaacaccacccaggtaaagcccccaaactcatcatttttgatgtcaacaagcggccctcaggagtccctgatcgcttctctggctccaagtctggcaacacggcctccctgaccatctctgggctccagcctgacgatgagggtgaatattattgctgctcatatggagacagttataccgccctctatgtcttcggatccgggaccgaaatcaccgtcctaagtcagcccaaggccaaccccactgtcactctgttcccgccctcctctgaggagctccaagccaacaaggccacactagtgtgtctgatcagtgacttctacccgggagctgtgacagtggcctggaaggcagatggcagccccgtcaaggcgggagtggagaccaccaaaccctccaaacagagcaacaacaagtacgcggccagcagctacctgagcctgacgcccgagcagtggaagtcccac

SEQ ID NO: 462 - DNA, 686 bp, Artificial Sequence
  Synthetic construct
cgtatctgggggctggggtctcaggaggcagcgctctcgggacgtctccaccatggcctgggctctgctgctcctcaccctcctcactcagggcacagtgtcctgggcccagtctgccctgactcagcctgcctccgtgtctgggtctcctggacagtcgatcaccatctcctgcactggaaccaacagtgacgttggtggttatatgtatgtctcctggtaccaacaacacccaggcagagcccccaaactcatgatttatgatgtcactaaccggccctcagggatttctactcgcttctctgggtccaagtctggcaacacggcctccctggccatctctgggctccagcctgaagacgaggctgaatatttttgcacttcacatgcgagcagtggcgttttgttgatcggcggggggaccaagctgaccgtcctaggtcagcccaaggctgccccctcggtcactctgttcccgccctcctctgaggagcttcaagccaacaaggccacactggtgtgtctcataagtgacttctacccgggagccgtgacagtggcctggaaggcagatagcagccccgtcaaggcgggagtggagaccaccacaccctccaaacaaagcaacaacaagtacgcggccagcagctatctgagcctgacgcctgagcagtggaagtcccaca

SEQ ID NO: 463 - DNA, 678 bp, Artificial Sequence
  Synthetic construct
gggggctggtcgcaccctgtgcaggagtcagtctcagtcaggacacagcatggacatgagggtccccgctcagctcctgggactcctgctactctggctccgaggtgccagatgtgacatccaaatgacccaatctccatcctccctgtctgcatctgtcggagacacagtcactatttcctgccgggcaagtcagagcatttacacctatttaaattggtatcaacagacaccagggaaagcccctaaggtcctgatctattccgcctcaaatctgcaaagtggggtcccttcgaggttcagtggcagtggatctgggacagatttcactctcaccatcagccgtctgcaacctgaagattttgtgacttactactgtcaacagagtttcgcaacgcctcggacgttcggccaagggaccagggtgacattcaaacgaactgtggctgcaccatctgtcttcatcttcccgccatctgatgagcagttgaaatctggaactgcctctgttgtgtgcctgctgaataacttctatcccagagaggccaaagtacagtggaaggtggataacgccctccaatcgggtaactcccaggagagtgtcacagagcaggacagcaaggacagcacctacagcctcagcagcaccctgacgctgagcaaagcagactacgagaa

SEQ ID NO: 464 - DNA, 719 bp, Artificial Sequence
  Synthetic construct
gggagaggggataagacagggctgggggcaggcccagtgctggggtctcaggaggcagcactctcgggacgtctccaccatggcctgggctctgctcctcctcaccctcctcactcagggcacaggatcctgggctcagtctgccctgactcagcctcgctcagtgtccgggtctcctggacagtcagtcaccatctcctgcaatgggttcaccactgattttggtgatattgactctgtctcctggtaccaacagcgcccagacaaggcacccaaactcatcatttatgatgtcactaagaggccctcaggggttcctgatcgcttctctggctccaggtctggcaacacggcctccctgaccatctctggcctccagactgaagatgagggtgattattattgctgttcatatgtcggcaggtacactgccctgtatgtcttcgcatctgggaccacggtcaccgtcctgggtcagcccaaggccaaccccactgtcactctgttcccgccctcctctgaggagctccaagccaacaaggccacactagtgtgtctgatcagtgacttctacccgggagctgtgacagtggcctggaaggcagatggcagccccgtcaaggcgggagtggagaccaccaaaccctccaaacagagcaacaacaagtacgcggccagcagctacctgagcctgacgcccgagcagtggaagtcccaca

SEQ ID NO: 465 - DNA, 804 bp, Artificial Sequence
  Synthetic construct
ggctgagttactaagatgagccagccctgcagctgtgctcagcctgccccatgccctgctgattgatttgcatgttccagagcacagcctcctgccctgaagacttttttatgggctggtcgcaccctgtgcaggagtcagtctcagtcaggacacagcatggacatgagggtccccgctcagctcctgggactcctgctactctggctccgaggtgccagatgtgacatccaaatgacccaatctccatcctccctgtctgcatctgtcggagacacagtcactatttcctgccgggcaagtcagagcatttacacctatttaaattggtatcagcagacaccaggaaaagcccctaaggtcctgatctattccgcctcaaatctacaaagtggggtcccatcgaggttcagtggcagtggatctgggacagatttcactctcaccatcagccgtctccaacctgaagattttgtgacttactactgtcaacagagtttcggaacgcctcggacgttcggccaagggaccagggtgtcattcaatcgaactgtggctgcaccatctgtcttcatcttcccgccatctgatgagcagttgaaatctggaactgcctctgttgtgtgcctgctgaataacttctatcccagagaggccaaagtacagtggaaggtggataacgccctccaatcgggtaactcccaggagagtgtcacagagcaggacagcaaggacagcacctacagcctcagcagcaccctgacgctgagcaaagcagactacgagaaacacaaagtctacgcc

SEQ ID NO: 466 - DNA, 762 bp, Artificial Sequence
  Synthetic construct
ggggcatggaatgtgatgtccctgcccacttcttcactgagggaataagaggctttagggcctcaggctcagctgagagactgaagaacccagcattgcagcagctccaccatggcctgggctcctctgctcctcaccctcctcagtctcctcacagggtctctctgccagcctgtgctcacacaaccaccttctgcgtcagcctccctgggagcctcggtcacactcacctgcactctgagcagcgcctacagttattataaagtggactggtatcaacagagaccaggaaagggcccccgatttgtgatgcgagtgggcatcggtgggattgtgggatccaggggggatggcatccctgatcgcttcgcaggctggggctcaggcctgaatcgatctttgatcatcaagaatgttcaggaagaggatgagagtgactaccactgtggggcagaccatggcagaggaaagaacttcatgttggtattcggcggagggaccaaggtgaccgtcccacgtcagcccaaggctgccccctcggtcactctgttcccgccctcctctgaggagcttcaagccaacaaggccacactggtgtgtctcataagtgacttctacccgggagccgtgacagtggcctggaaggcagatagcagccccgtcaaggcgggagtggagaccaccacaccctccaaacaaagcaacaacaagtacgcggccagcagctatctgagcctgacgcctgagcagtggaagtcccac

SEQ ID NO: 467 - DNA, 1019 bp, Artificial Sequence
  Synthetic construct
ccctctaagacttcattagacattccctacgaatggttatactctcctgtatactcccaatacaactctaaaatatattattccatatagtccttaggtttgtattaaagtttgacttttttccttcaaaatatctcttgtcacaacagcggctctagagagaaatacattccctccaggcaaatctatgctgcgctggtctgacctgggaccctggggacattgcccctgtgctgagttactaagatgagccagccctgcagctgtgctcagcctgccccatgccctgctgattgatttgcatgttccagagcacagcctcctgccctgaagacttttttatgggctggtcgcaccctgtgcaggagtcagtctcagtcaggacacagcatggacatgagggtccccgctcagctcctgggactcctgctactctggctccgaggtgccagatgtgacatccaaatgacccaatctccatcctccctgtctgcatctgtcggagacacagtcactatttcctgccgggcaagtcagagcatttacacctatttaaattggtatcagcagacaccaggaaaagcccctaaggtcctgatctattccgcctcaaatctacaaagtggggtcccatcgaggttcagtggcagtggatctgggacagatttcactctcaccatcagccgtctccaacctgaagattttgtgacttactactgtcaacagagtttcggaacgcctcggacgttcggccaagggaccagggtgtcattcaatcgaactgtggctgcaccatctgtcttcatcttcccgccatctgatgagcagttgaaatctggaactgcctctgttgtgtgcctgctgaataacttctatcccagagaggccaaagtacagtggaaggtggataacgccctccaatcgggtaactcccaggagagtgtcacagagcaggacagcaaggacagcacctacagcctcagcagcaccctgacgctgagcaaagcagactacgagaa

SEQ ID NO: 468 - DNA, 761 bp, Artificial Sequence
  Synthetic construct
gggagctgtgctcagcctgccccatgccctgctgattgatttgcatgttccagagcacagcctcctgccctgaagacttttttatgggctggtcgcaccctgtgcaggagtcagtctcagtcaggacacagcatggacatgagggtccccgctcagctcctgggactcctgctactctggctccgaggtgccagatgtgacatccaaatgacccaatctccatcctccctgtctgcatctgtcggagacacagtcactatttcctgccgggcaagtcagagcatttacacctatttaaattggtatcagcagacaccaggaaaagcccctaaggtcctgatctattccgcctcaaatctacaaagtggggtcccatcgaggttcagtggcagtggatctgggacagatttcactctcaccatcagccgtctccaacctgaagattttgtgacttactactgtcaacagagtttcggaacgcctcggacgttcggccaagggaccagggtgtcattcaatcgaactgtggctgcaccatctgtcttcatcttcccgccatctgatgagcagttgaaatctggaactgcctctgttgtgtgcctgctgaataacttctatcccagagaggccaaagtacagtggaaggtggataacgccctccaatcgggtaactcccaggagagtgtcacagagcaggacagcaaggacagcacctacagcctcagcagcaccctgacgctgagcaaagcagactacgagaa

SEQ ID NO: 469 - DNA, 765 bp, Artificial Sequence
  Synthetic construct
gggacacagctcctcctgcagcagcccctgactgctgatttgcatcacgggccgctctttccagcaaggggataagagaggcctggaagaacctgcccagcctgggcctcaggaagcagcatcggaggtgcctcagccatggcatggatccctctcttcctcggcgtccttgctcactgcacaggatccgtggcctcctttgagttgactcagccaccctcagtgtccgtgtccccaggacagacagccaccttcacctgctcttcaaataacctgggcgccaaatatatttcctggtatcaacagaagacaggccagtcccctaaactggtcatctataaaaatgacaggcggccctcagggacccctgaccgattttctggctccaattctggagacacagcctctctgaccatcaccgggacccaagtcatggatgaggctgattattactgtcaggcgtgggacgacggttctccttggggggtattcggcggagggaccacgctgaccgtcctaagtcagcccaaggctgccccctcggtcactctgttcccgccctcctctgaggagcttcaagccaacaaggccacactggtgtgtctcataagtgacttctacccgggagccgtgacagtggcctggaaggcagatagcagccccgtcaaggcgggagtggagaccaccacaccctccaaacaaagcaacaacaagtacgcggccagcagctatctgagcctgacgcctgagcagtggaagtcccac

SEQ ID NO: 470 - DNA, 690 bp, Artificial Sequence
  Synthetic construct
atctgtttcttatatgggggagctacaacaggcaggcaggggcagcaagatggtgttgcagacccaggtcttcatttctctgttgctctggatctctggtgcctccggggacatcgtgatgacccagtctccagactccctggctgtgtctctgggcgagagggccaccatccactgcaagtccagtcgaactattttatacaactccaacaataagaattacttagcttggtaccaccagaaaccaggacagcctcctaggctgctcgtttactgggcatctacccgggaatccggggtccccgaccgattcagtggcagcgggtctgggacagatttcactctcaccatcaacaacctgcaggctgaggatgtggcaatttattactgtcagcaatattttgcttttccactcactttcggcggagggaccaaggtggagatcaaacgaactgtggctgcaccatctgtcttcatcttcccgccatctgatgagcagttgaaatctggaactgcctctgttgtgtgcctgctgaataacttctatcccagagaggccaaagtacagtggaaggtggataacgccctccaatcgggtaactcccaggagagtgtcacagagcaggacagcaaggacagcacctacagcctcagcagcaccctgacgctgagcaaagcagactacgagaa

SEQ ID NO: 471 - DNA, 703 bp, Artificial Sequence
  Synthetic construct
ggggagtccagagcccatatcaatgcctgggtcagagctctggagaagagctgctcagttaggacccagagggaaccatggaaaccccagcgcagcttctcgtcctcctgctactctggctcccagaaacccccggagaaattgtgttgacgcagtctccaggcaccctgtctttgtctccaggggaaagagccaccctctcctgcagggccagtcagactcttaacaacgactacttagcctggtaccagcaaagaccgggccagcctcccaggctcctcatttatgatgcatccaacagggccactggcatcccagacaggttcagtggcagtgggtctggggcagacttcactctcaccatcagcagactggagcctgaagattttgcagtgtattactgtcagcaatatgggagtccacctcagacgttcggccaagggaccaaggtggaaaccaaacgaactgtggctgcaccatctgtcttcatcttcccgccatctgatgagcagttgaaatctggaactgcctctgttgtgtgcctgctgaataacttctatcccagagaggccaaagtacagtggaaggtggataacgccctccaatcgggtaactcccaggagagtgtcacagagcaggacagcaaggacagcacctacagcctcagcagcaccctgacgctgagcaaagcagactacgagaa

SEQ ID NO: 472 - DNA, 820 bp, Artificial Sequence
  Synthetic construct
gggctggcctgatcacctgggcatgggctgctgagagcagaaaggggaggcagattgtctctgcagctgcaagcccagcacccgccccagctgctttgcatgtccctcccagccgccctgcagtccagagcccatatcaatgcctgggtcagagctctggagaagagctgctcagttaggacccagagggaaccatggaaaccccagcgcagcttctcgtcctcctgctactctggctcccagaaacccccggagaaattgtgttgacgcagtctccaggcaccctgtctttgtctccaggggaaagagccaccctctcctgcagggccagtcagactcttaacaacgactacttagcctggtaccagcaaagaccgggccagcctcccaggctcctcatttatgatgcatccaacagggccactggcatcccagacaggttcagtggcagtgggtctggggcagacttcactctcaccatcagcagactggagcctgaagattttgcagtgtattactgtcagcaatatgggagtccacctcagacgttcggccaagggaccaaggtggaaaccaaacgaactgtggctgcaccatctgtcttcatcttcccgccatctgatgagcagttgaaatctggaactgcctctgttgtgtgcctgctgaataacttctatcccagagaggccaaagtacagtggaaggtggataacgccctccaatcgggtaactcccaggagagtgtcacagagcaggacagcaaggacagcacctacagcctcagcagcaccctgacgctgagcaaagcagactacgagaa

SEQ ID NO: 473 - DNA, 690 bp, Artificial Sequence
  Synthetic construct
ttgtcttatctgggggctggggtctcaggaggcagcgctctcgggacgtctccaccatggcctgggctctgctgctcctcaccctcctcactcagggcacagtgtcctgggcccagtctgccctgactcagcctgcctccgtgtctgggtctcctggacagtcgatcaccatctcctgcactggaaccaacagtgacgttggtggttatatgtatgtctcctggtaccaacaacacccagacaaagcccccaaactcatgatttatgatgtcactaagcggccctcagggatttctactcgcttctctgggtccaagtctggcaacacggcctccctggccatctctgggctccagcctgaagacgaggctgaatatttttgcacttcacatgcgaccagtggcgttttgttgatcggcggggggaccaagctgaccgtcctaggtcagcccaaggctgccccctcggtcactctgttcccgccctcctctgaggagcttcaagccaacaaggccacactggtgtgtctcataagtgacttctacccgggagccgtgacagtggcctggaaggcagatagcagccccgtcaaggcgggagtggagaccaccacaccctccaaacaaagcaacaacaagtacgcggccagcagctatctgagcctgacgcctgagcagtggaagtcccaca

SEQ ID NO: 474 - DNA, 707 bp, Artificial Sequence
  Synthetic construct
tgtcttagatggggaagctctgcttcagctgtgagcgcagaaggcaggactcgggacaatcttcatcatgacctgctcccctctcctcctcacccttctcattcactgcacagggtcctgggcccagtctgtgttgacgcagccgccctcagtgtctgcggcccctggacagaaggtcaccatctcctgctctggaatcacctccaacattggaaataattttgtctcctggtaccagcaactcccaggaacagccccccgactcgtcatttttgacaacaataagcgaccctcagggattcctgaccgattctctgcctccaagtctggcacgtcagccaccctggacatcaccggactccagactggggacgaggccgattattactgcggaacctgggatagtggcctgaatggtggcccttatgtcttcggaactgggaccacagtcaccgtcctcagtcagcccaaggccaaccccactgtcactctgttcccgccctcctctgaggagctccaagccaacaaggccacactagtgtgtctgatcagtgacttctacccgggagctgtgacagtggcctggaaggcagatggcagccccgtcaaggcgggagtggagaccaccaaaccctccaaacagagcaacaacaagtacgcggccagcagctacctgagcctgacgcccgagcagtggaagtcccaca

SEQ ID NO: 475 - DNA, 720 bp, Artificial Sequence
  Synthetic construct
ggggaatgcctgggtcagagctctggagaagagctgctcagttaggacccagagggaaccatggaaaccccagcgcagcttctcttcctcctgctactctggctcccagatatcagcggaaaaattgtgttgacgcagtctccaggcaccctgtctttgtctccaggggaaagagccaccctctcttgcagggccagtcagagtcttagtacctactccttagcctggtatcagcagaaacctggccaggctcccaggctcctcatctatggtgcatccaccagggtcactggcgtcccggacaggttcagtggcagtgggtctgggacagacttcactctcaccatcaatagactggaggctgaagattttgcagtgtattactgtcagcagtacagtagtccacctctgacgttcggccaagggacgaaggtggaaatcaaacgaactgtggctgcaccatctgtcttcatcttcccgccatctgatgagcagttgaaatctggaactgcctctgttgtgtgcctgctgaataacttctatcccagagaggccaaagtacagtggaaggtggataacgccctccaatcgggtaactcccaggagagtgtcacagagcaggacagcaaggacagcacctacagcctcagcagcaccctgacgctgagcaaagcagactacgagaaacacaaagtctacgcctgcgaagtcacccatcag

SEQ ID NO: 476 - DNA, 700 bp, Artificial Sequence
  Synthetic construct
ggggccagagcccatatcaatgcctgggtcagagctctggagaagagctgctcagttaggacccagagggaaccatggaaaccccagcgcagcttctcttcctcctgctactctggctcccagatatcagcggaaaaattgtgttgacgcagtctccaggcaccctgtctttgtctccaggggaaagagccaccctctcttgcagggccagtcagagtcttagtacctactccttagcctggtatcagcagaaacctggccaggctcccaggctcctcatctatggtgcatccaccagggtcactggcgtcccggacaggttcagtggcagtgggtctgggacagacttcactctcaccatcaatagactggaggctgaagattttgcagtgtattactgtcagcagtacagtagtccacctctgacgttcggccaagggacgaaggtggaaatcaaacgaactgtggctgcaccatctgtcttcatcttcccgccatctgatgagcagttgaaatctggaactgcctctgttgtgtgcctgctgaataacttctatcccagagaggccaaagtacagtggaaggtggataacgccctccaatcgggtaactcccaggagagtgtcacagagcaggacagcaaggacagcacctacagcctcagcagcaccctgacgctgagcaaagcagactacgagaa

SEQ ID NO: 477 - DNA, 671 bp, Artificial Sequence
  Synthetic construct
ggggacaccctgtgcaggagtcagacccaggcaggacacagcatggacatgagggtccccgctcagctcctggggctcctgctgctctggttcccagattccagatgcgacatccagatgacccagtctccatcttccgtgtctgcatctgtaggagacagagtcaccatcacttgtcgggcgagtcagggtgttagcaactggttagcctggtatcagcagaaaccagggaaagcccctaaactcctggtctatgctggttccactttggaaagtggggtcccatctaggttcagcggcagtggatctgggacagatttcactctcaccatcaccagtctgcagcctgaagatgttgcaacttattattgtcaacaggctcacagtctccctcgaaccttcggccaagggacacgactggagattaaacgaactgtggctgcaccatctgtcttcatcttcccgccatctgatgagcagttgaaatctggaactgcctctgttgtgtgcctgctgaataacttctatcccagagaggccaaagtacagtggaaggtggataacgccctccaatcgggtaactcccaggagagtgtcacagagcaggacagcaaggacagcacctacagcctcagcagcaccctgacgctgagcaaagcagactacgagaa

SEQ ID NO: 478 - DNA, 665 bp, Artificial Sequence
  Synthetic construct
gggggagaagagctgctcagttaggacccagagggaaccatggaaaccccagcgcagcttctcttcctcctgctactctggctcccagatgtcaccggagaaattgtgttgacgcagtctccaggcaccctgtctttgtctccaggggaaagagccaccctctcctgcagggccagtcagagtgttgccaacagctacttagcctggtaccagcagaaacctggccaggctcccagactcctcatctttgatgcatccaccagggccactggcatcccagacaggttcagtggcagtgggtctgggacagacttcactctcaccatcagcagactggaacctgaagattttgtagtgtattactgtcaacagtatagtatgtcaccggggacgttcggccatgggaccaaggtggacttcaaacgaactgtggctgcaccatctgtcttcatcttcccgccatctgatgagcagttgaaatctggaactgcctctgttgtgtgcctgctgaataacttctatcccagagaggccaaagtacagtggaaggtggataacgccctccaatcgggtaactcccaggagagtgtcacagagcaggacagcaaggacagcacctacagcctcagcagcaccctgacgctgagcaaagcagactacgagaa

SEQ ID NO: 479 - DNA, 791 bp, Artificial Sequence
  Synthetic construct
gggggctgagttactaagatgagccagccctgcagctgtgctcagcctgccccatgccctgctgattgatttgcatgttccagagcacagcctcctgccctgaagacttttttatgggctggtcgcaccccgtgcaggagtcagtctcagtcaggacacagcatggacatgagggtccccgctcagctcctggggctcctgctactctggctccgaggtgccagatgtgacatccaggtgacccagtctccatcctccctgtctgcatctgtcggagacagagtcaccattacttgccggacaagtcagagcatttacacctatttaaattggtatcagcagaaaccagggaaagcccctcaggtcttgatctataccgcatccagtttgcagagtggcgtcccatcaaggttcagtggcagtggatctgggacagatttcactctcaccatcaccaatctgcaacctgaagattttgcgacttactattgtcaacagagtttcagtacccctcggacgttcggccgagggaccagggtggacatcaaacgaactgtggctgcaccatctgtcttcatcttcccgccatctgatgagcagttgaaatctggaactgcctctgttgtgtgcctgctgaataacttctatcccagagaggccaaagtacagtggaaggtggataacgccctccaatcgggtaactcccaggagagtgtcacagagcaggacagcaaggacagcacctacagcctcagcagcaccctgacgctgagcaaagcagactacgagaa

SEQ ID NO: 480 - DNA, 711 bp, Artificial Sequence
  Synthetic construct
tttctgatctgggggaggctctgcttcagctgtgggcacaagaggccgcactcaggacaatctccagcatggcctggtctcctctcctcctcactctcctcgcgcactgcacagggtcctgggcccagtctgtgctgacgcagccgccctcagtgtctggggccccaggacagagggtcaccatctcctgcactgggagcaggtccaacatcggggcaggttatgatgtacactggtatcaacaacttccaggaaaaacccccaaactcgtcatttatgggaccaccaatcggccctcaggggtccctgaccgattctctggctccaaaactggcacctcagcgtccctggtcatcactggtgtccaggctgaggatgaggctgattattactgccaggcctatgacctcagcctcagtggcgccgatgtggtgttcggtggagggaccaaactgaccgtcctaggtcagcccaaggctgccccctcggtcactctgttcccgccctcctctgaggagcttcaagccaacaaggccacactggtgtgtctcataagtgacttctacccgggagccgtgacagtggcctggaaggcagatagcagccccgtcaaggcgggagtggagaccaccacaccctccaaacaaagcaacaacaagtacgcggccagcagctatctgagcctgacgcctgagcagtggaagtcccaca

SEQ ID NO: 481 - DNA, 685 bp, Artificial Sequence
  Synthetic construct
gggatcaatgcctgggtcagagctctggagaagagctgctcagttaggacccagagggagccatggaaaccccagcgcagcttctcttcctcctgctactctggctcccagatatgacagaagaagttgtgttgacgcagtctccaggcactctgtcctcatctccaggggaaagggccaccctctcctgcagggccagtgagactgttgccggcaattatctggcctggtatcaacaaaaacctggccaggctcccaggctcctcatctatgctacttcgaccagggcaatcggcaccccagagaggtttagtggcagtgggtccgggacagacttcactctcaccatcaacagactggagcctgaagattttgcagtctatttttgtcagaagtatggtcctccctgggctttcggcccaggcaccaaagtggacacccgacgaactgtggctgcaccatctgtcttcatcttcccgccatctgatgagcagttgaaatctggaactgcctctgttgtgtgcctgctgaataacttctatcccagagaggccaaagtacagtggaaggtggataacgccctccaatcgggtaactcccaggagagtgtcacagagcaggacagcaaggacagcacctacagcctcagcagcaccctgacgctgagcaaagcagactacgagaa

SEQ ID NO: 482 - DNA, 662 bp, Artificial Sequence
  Synthetic construct
atggggagaagtctctctcagtcaggacacagcatggacatgagggtccctgctcagctcctgggactcctgctgctctggctcccagataccagatgtgacatccagatgacccagtctccatcctccctgtctgcatctataggagacagagtcaccatcacttgccgggcgagtcagggcattacaaatcatttagcctggtatcagcagaaagcagggaaagctcctacgctcctgatctatggtgtatccactttgcagtcaggggtcccatctcggttcagtgggagtggatctggtacagatttcgctctcaccataagtagcctgcagcctgacgatgttgcaacttattactgtcaaaagtataacagtgccccgtggacgttcggccaagggaccaaggtggaaatcaaacgaactgtggctgcaccatctgtcttcatcttcccgccatctgatgagcagttgaaatctggaactgcctctgttgtgtgcctgctgaataacttctatcccagagaggccaaagtacagtggaaggtggataacgccctccaatcgggtaactcccaggagagtgtcacagagcaggacagcaaggacagcacctacagcctcagcagcaccctgacgctgagcaaagcagactacgagaa

SEQ ID NO: 483 - DNA, 721 bp, Artificial Sequence
  Synthetic construct
tgaacgctccggtttcttatatgggagtccagagcccatatcaatgccagggtcagagctctggagaagagctgctcagttaggacccagagggaaccatggaaaccccagcgcagcttctcttcctcctgctactctggctcccagatatgaccgatgaaattgtgttgacgcagtctccgggcactctgggctcatcttcaggggaaagggccaccctctcctgcagggccagtcagagtattgccggcacttatgtggcctggtatcaacaaaaacctggccaggctcccaggctcctcatttatggtacatcgaccagggcaaccggcatcccggagaggtttagtggcagtgggtctgggacagacttcagtctcaccatcaccagagtggagcctgaagattttgcagtctattattgccagaagtatggtaatccctgggctttcggcccaggcaccaaagtggacatcagacgaactgtggctgcaccatctgtcttcatcttcccgccatctgatgagcagttgaaatctggaactgcctctgttgtgtgcctgctgaataacttctatcccagagaggccaaagtacagtggaaggtggataacgccctccaatcgggtaactcccaggagagtgtcacagagcaggacagcaaggacagcacctacagcctcagcagcaccctgacgctgagcaaagcagactacgagaa

SEQ ID NO: 484 - DNA, 794 bp, Artificial Sequence
  Synthetic construct
gctgctgagagcagaaaggggaggcagattgtctctgcagctgcaagcccagcacccgccccagctgctttgcatgtccctcccagccgccctgcagtccagagcccatatcaatgcctgggtcagagctctggagaagagctgctcagttaggacccagagggaaccatggaaaccccagcgcagcttctcttcctcctgctactctggctcccagatatcaccggagaaattgtgttgacgcagtctccaggtaccctgtctttgtctccaggggaaagagccaccctctcctgcagggccagtcagagtgttgccaacagctacttagcctggtaccaacagaaacctggccaggctcccagactcctcatctttgatacatcctccagggccactggcatcccagacaggttcagtggcagtgggtctgggacagacttcactctcaccatcagcagactggaacctgaagattttgtagtgtattactgtcagcagtatagtatgtcaccagggacgttcggccaagggaccaaggtggaaatcaaacgaactgtggctgcaccatctgtcttcatcttcccgccatctgatgagcagttgaaatctggaactgcctctgttgtgtgcctgctgaataacttctatcccagagaggccaaagtacagtggaaggtggataacgccctccaatcgggtaactcccaggagagtgtcacagagcaggacagcaaggacagcacctacagcctcagcagcaccctgacgctgagcaaagcagactacgagaa

SEQ ID NO: 485 - DNA, 691 bp, Artificial Sequence
  Synthetic construct
gggggtttgcattgtgcactgagctacaacaggcaggcaggggcagcaagatggtgttgcagacccaggtcttcatttctctggtgctctggatctctggtgtctccggagacatcgtgatgacccagtctccagactccctggctgtgtctctgggcgagagggccaccatcaactgcaggtccaaccagagtcttctctacaatttcaacaataagaattatttagcctggtaccgccagaaaccgggacagcctcccaagttactcatttactgggcgtctacccgggaatccggggtccctgaccgcttcactggcggcgggtctgggacagatttcactctcaccatcagcggcctgcaggctgaagatgtggcagtttattactgtcaccaatattatagtgttccgctcactttcggcggagggaccagggtgcagatcaaacgaactgtggctgcaccatctgtcttcatcttcccgccatctgatgagcagttgaaatctggaactgcctctgttgtgtgcctgctgaataacttctatcccagagaggccaaagtacagtggaaggtggataacgccctccaatcgggtaactcccaggagagtgtcacagagcaggacagcaaggacagcacctacagcctcagcagcaccctgacgctgagcaaagcagactacgagaa

SEQ ID NO: 486 - DNA, 744 bp, Artificial Sequence
  Synthetic construct
ggggccctgactgctgatttgcatcacgggccgctctttccagcaaggggataagagaggcctggaagaacctgcccagcctgggcctcaggaagcagcatcggaggtgcctcagccatggcatggatccctctcttcctcggcgtccttgctcactgcacaggatccgtggcctcctttgaactgactcaaccaccctccgtgtccgtgtccccaggccagacagccaccttcacctgctctacccataagctgggcgacaaatatgtttcctggtatcagcagaagccaggccagtcccctatacttatcctctatcaaaatgacaggcggccctcagggacccctgagcgcttctctggctccaattctggagacacagccactctgaccatcagcgggacgcaggccatggatgaggctgactattactgtcaggcgtgggacgacaactctccttggggggtgttcggcggagggaccaagctgaccgtcctacgtcagcccaaggctgccccctcggtcactctgttcccgccctcctctgaggagcttcaagccaacaaggccacactggtgtgtctcataagtgacttctacccgggagccgtgacagtggcctggaaggcagatagcagccccgtcaaggcgggagtggagaccaccacaccctccaaacaaagcaacaacaagtacgcggccagcagctatctgagcctgacgcctgagcagtggaagtcccac

SEQ ID NO: 487 - DNA, 777 bp, Artificial Sequence
  Synthetic construct
ggggagaaagctgggggtctgatttgcatggatggaccctcccactctcagagtatgaagaggggcagggagagatttggggaggctctgcttcagctgtgggcacaagaggccgcactcaggacaatctccagcatggcctggtctcctctcctcctcactctcctcgcgcactgcacagggtcctgggcccagtccgaactgacgcagccgccctcagtgtctggggccccaggacagagggtcaccatctcctgcactgggggcaggtccaacatcggggcaggttatgatgtccactggtatcagcaacttccaggaaaagcccccaaactgctcatctatgggagcaccaatcggccctcaggggtccctgaccgattctcgggctccaaggctggcacctcagcttccctggccatcagtgggctccagcctgaggatgaggctgattattactgccaggcctctgacctcagtttgagcggcgccgatgtggtgttcggcggagggaccaaactgaccgtcctaggtcagcccaaggcagccccctcggtcactctgttcccgccctcctctgaggagcttcaagccaacaaggccacactggtgtgtctcataagtgacttctacccgggagccgtgacagtggcctggaaggcagatagcagccccgtcaaggcgggagtggagaccaccacaccctccaaacaaagcaacaacaagtacgcggccagcagctatctgagcctgacgcctgagcagtggaagtcccac

SEQ ID NO: 488 - DNA, 749 bp, Artificial Sequence
  Synthetic construct
gggagcagcccctgactgctgatttgcatcacgggccgctctttccagcaaggggataagagaggcctggaagaacctgcccagcctgggcctcaggaagcagcatcggaggtgcctcagccatggcatggatccctctcttcctcggcgtccttgctcactgcacaggatccgtggcctcctttgaactgactcaaccaccctccgtgtccgtgtccccaggccagacagccaccttcacctgctctacccataagctgggcgacaaatatgtttcctggtatcagcagaagccaggccagtcccctatacttatcctctatcaaaatgacaggcggccctcagggacccctgagcgcttctctggctccaattctggagacacagccactctgaccatcagcgggacgcaggccatggatgaggctgactattactgtcaggcgtgggacgacaactctccttggggggtgttcggcggagggaccaagctgaccgtcctacgtcagcccaaggctgccccctcggtcactctgttcccgccctcctctgaggagcttcaagccaacaaggccacactggtgtgtctcataagtgacttctacccgggagccgtgacagtggcctggaaggcagatagcagccccgtcaaggcgggagtggagaccaccacaccctccaaacaaagcaacaacaagtacgcggccagcagctatctgagcctgacgcctgagcagtggaagtcccac

SEQ ID NO: 489 - DNA, 681 bp, Artificial Sequence
  Synthetic construct
tggggaggctggacacacttcatgcaggaatcagtcccactcaggacacagcatggacatgagggtccccgctcagctcctggggctcctgctgctctggttcccaggtgccaggtgtgagatccagatgacccagtctccatcttccctgtctgcatctgtaggagacagagtcaccatcacttgccggacaagtcaggacattagaaatgatttaggctggtatcagcagaaaccagggaaagcccctaagcggctaatctctactgcatccactttgcaaactggtgtcccctcaaggttcagcggcagtggatctgggacagaattcactctcacaatcagcagcctgctgcctgaagattttgcgacttattactgtctacagcataatacttatcctccgacgttcggcccagggaccaaggtggacatcaaacgaactgtggctgcaccatctgtcttcatcttcccgccatctgatgagcagttgaaatctggaactgcctctgttgtgtgcctgctgaataacttctatcccagagaggccaaagtacagtggaaggtggataacgccctccaatcgggtaactcccaggagagtgtcacagagcaggacagcaaggacagcacctacagcctcagcagcaccctgacgctgagcaaagcagactacgagaa

SEQ ID NO: 490 - DNA, 710 bp, Artificial Sequence
  Synthetic construct
tttcttctctggggaggctctgcttcagctgtgggcacaagaggccgcactcaggacaatctccagcatggcctggtctcctctcctcctcactctcctcgcgcactgcacagggtcctgggcccagtccgaactgacgcagccgccctcagtgtctggggccccaggacagagggtcaccatctcctgcactgggggcaggtccaacatcggggcaggttatgatgtccactggtatcagcaacttccaggaaaagcccccaaactgctcatctatgggaccaccaatcggccctcaggggtccctgaccgattctcgggctccaaggctggcacctcaacttccctggccatcagtgggctccagcctgaggatgaggctgattattactgccaggcctctgacctcagtttgagcggcgccgatgtggtgttcggcggagggaccaaactgaccgtcctaggtcagcccaaggcagccccctcggtcactctgttcccgccctcctctgaggagcttcaagccaacaaggccacactggtgtgtctcataagtgacttctacccgggagccgtgacagtggcctggaaggcagatagcagccccgtcaaggcgggagtggagaccaccacaccctccaaacaaagcaacaacaagtacgcggccagcagctatctgagcctgacgcctgagcagtggaagtcccaca

SEQ ID NO: 491 - DNA, 856 bp, Artificial Sequence
  Synthetic construct
gcttttctattcatacaattacacattctgtgatgatatttttggctcttgatttacattgggtactttcacaacccactgctcatgaaatttgcttttgtactcactggttgtttttgcataggcccctccaggccacgaccagctgtttggattttataaacgggccgtttgcattgtgaactgagctacaacaggcaggcaggggcagcaagatggtgttgcagacccaggtcatcatttctctgttgctctggatctctggtgcctccggggacatcgtgatgacccagtctccagactccctcagtgtgtctctgggcgagagggccaccgtcaactgcaagtccagtcggactattttattcaattccaacaataaaaattacttagcttggtaccagcaaaaaccaggacagcctcctaggctgctcatttactgggcttctactcggggatctggggtccctgagcgattcagtggcagcgggtctgggacagatttcactctcaccatcagcagcctgcaggctgaagatgtggcagtttattactgtcagcaatattacgctactccgctcactttcggcggagggaccaaggtggagatcaaacgaactgtggctgcaccatctgtcttcatcttcccgccatctgatgagcagttgaaatctggaactgcctctgttgtgtgcctgctgaataacttctatcccagagaggccaaagtacagtggaaggtggataacgccctccaatcgggtaactcccaggagagtgtcacagagcaggacagcaaggacagcacctacagcctcagcagcaccctgacgctgagcaaagcagactacgagaa

SEQ ID NO: 492 - DNA, 651 bp, Artificial Sequence
  Synthetic construct
gggagcttcagctgtggtagagaagacaggattcaggacaatctccagcatggccggcttccctctcctcctcaccctcctcactcactgtgcagggtcctgggcccagtctgtgctgactcagccaccctcagcgtctggtccccccgggcagagggtcaccatctcttgttctggaagcagctccaacatcggaaataattatgtatactggtaccagcagctcccaggaacggcccccaaactcctcatctataggaataatcagcggccctcaggggtccctgaccgattctctggctccaagtctggcacctcagcctccctggccatcagtgggctccggtccgaggatgaggctgattattattgtgcagcatgggatgacagcctgagtggttttgatgtcttcggaactgggaccaaggtcaccgtcctaggtcagcccaaggccaaccccactgtcactctgttcccgccctcctctgaggagctccaagccaacaaggccacactagtgtgtctgatcagtgacttctacccgggagctgtgacagtggcctggaaggcagatggcagccccgtcaaggcgggagtggagaccaccacaccctccaaacaaagcaacaacaagtacgcggccagcagcta

SEQ ID NO: 493 - DNA, 695 bp, Artificial Sequence
  Synthetic construct
ggggatcaatgcctgggtcagagctctggggaggaactgctcagttaggacccagacggaaccatggaagccccagcgcagcttctcttcctcctgctactctggctcccagaaagcactggagaaatagaaatgacgcagtctccagccaccctgtctgtgtctccaggggaaagagccaccctctcctgcagggccagtcacagtgttagcaataacttagcctggtaccagcagaagcctggccaggctcccaggctcctcatctatggtgcgtccaccagggccactggtatcccagacaggttcagtggcagtgggtctgggacagagttcactctcaccatcagcagcctgcagtctcaagattttgcagtttattactgtcagcactataataactggccttttagggagtacacttttggccaggggaccaagctggagatcaaacgaactgtggctgcaccatctgtcttcatcttcccgccatctgatgagcagttgaaatctggaactgcctctgttgtgtgcctgctgaataacttctatcccagagaggccaaagtacagtggaaggtggataacgccctccaatcgggtaactcccaggagagtgtcacagagcaggacagcaaggacagcacctacagcctcagcagcaccctgacgctgagcaaagcagactacgagaa

SEQ ID NO: 494 - DNA, 679 bp, Artificial Sequence
  Synthetic construct
tacgttgaatttcttatatggggaggagtcagtctcagtcaggacacagcatggacatgagggtccccgctcagctcctgggactcctgctactgtggctccgaggtgccagatgtgacattcagatgacccagtctccatcttccctctctggttctgttggagacagaatcatcatctattgtcgggcaagccagcccattaataagtacctaaattggtatcaacaaaaaccggggagagccccccacctccttatttcatctgcttccgccttacagagtggggtcccatctaggttcggtggcagtgggtctgggacggatttcactctcaccatcaacaatctgcaacctgaagatgttgcaacttactactgtcagcagagttccgcaaccgtcgtcactttcggcggagggaccaaggtggagatcaggcgaactgtggctgcaccatctgtcttcatcttcccgccatctgatgagcagttgaaatctggaactgcctctgttgtgtgcctgctgaataacttctatcccagagaggccaaagtacagtggaaggtggataacgccctccaatcgggtaactcccaggagagtgtcacagagcaggacagcaaggacagcacctacagcctcagcagcaccctgacgctgagcaaagcagactacgagaa

SEQ ID NO: 495 - DNA, 688 bp, Artificial Sequence
  Synthetic construct
gccgcgttttcttatatggggagagctctggagaagagctgctcagttaggacccagagggaaccatggaaaccccagcgcagctgctcttcctcctcctactctggctcccagattccaccggagaaattgttttgacgcagcctccaggcaccctgtctttgtctccaggagaaagggccaccctctcctgcagggccagtcagagtgttaccaactacttagcctggtaccagcagaaacctggccaggctcccaggctcctcatctatggtgcctctaatagggccactggcatccctgacaggttcagtggcactgggtctgggacagacttcactctcactatctccagactggagcctgaagactttgcggtgtattactgtcagcagtatggtagctcctccctcactttcggcggagggaccaaagttgagatcaaacgaactgtggctgcaccatctgtcttcatcttcccgccatctgatgagcagttgaaatctggaactgcctctgttgtgtgcctgctgaataacttctatcccagagaggccaaagtacagtggaaggtggataacgccctccaatcgggtaactcccaggagagtgtcacagagcaggacagcaaggacagcacctacagcctcagcagcaccctgacgctgagcaaagcagactacgagaa

SEQ ID NO: 496 - DNA, 908 bp, Artificial Sequence
  Synthetic construct
gaatctaggtgatggtgagacaagaggacacaggggttaaattctgtggccgcaggggagaagttctaccctcagactgagccaacggccttttctggcctgatcacctgggcatgggctgctgagagcagaaaggggaggcagattgtctctgcagctgcaagcccagcacccgccccagctgctttgcatgtccctcccagccgccctgcagtccagagcccatatcaaagcctgggtcagagctctggagaagagctgctcagttaggacccagagggaaccatggaaaccccagcgcagctgctcttcctcctcctactctggctcccagattccaccggagaaattgttttgacgcagcctccaggcaccctgtctttgtctccaggagaaagggccaccctctcctgcagggccagtcagagtgttaccaactacttagcctggtaccagcagaaacctggccaggctcccaggctcctcatctatggtgcctctaatagggccactggcatccctgacaggttcagtggcactgggtctgggacagacttcactctcactatctccagactggagcctgaagactttgcggtgtattactgtcagcagtatggtagctcctccctcactttcggcggagggaccaaagttgagatcaaacgaactgtggctgcaccatctgtcttcatcttcccgccatctgatgagcagttgaaatctggaactgcctctgttgtgtgcctgctgaataacttctatcccagagaggccaaagtacagtggaaggtggataacgccctccaatcgggtaactcccaggagagtgtcacagagcaggacagcaaggacagcacctacagcctcagcagcaccctgacgctgagcaaagcagactacgagaa

SEQ ID NO: 497 - DNA, 758 bp, Artificial Sequence
  Synthetic construct
ggggcagctgcaagcccagcacccgccccagctgctttgcatgtccctcccagccgccctgcagtccagagcccatatcaaagcctgggtcagagctctggagaagagctgctcagttaggacccagagggaaccatggaaaccccagcgcagctgctcttcctcctcctactctggctcccagattccaccggagaaattgttttgacgcagcctccaggcaccctgtctttgtctccaggagaaagggccaccctctcctgcagggccagtcagagtgttaccaactacttagcctggtaccagcagaaacctggccaggctcccaggctcctcatctatggtgcctctaatagggccactggcatccctgacaggttcagtggcactgggtctgggacagacttcactctcactatctccagactggagcctgaagactttgcggtgtattactgtcagcagtatggtagctcctccctcactttcggcggagggaccaaagttgagatcaaacgaactgtggctgcaccatctgtcttcatcttcccgccatctgatgagcagttgaaatctggaactgcctctgttgtgtgcctgctgaataacttctatcccagagaggccaaagtacagtggaaggtggataacgccctccaatcgggtaactcccaggagagtgtcacagagcaggacagcaaggacagcacctacagcctcagcagcaccctgacgctgagcaaagcagactacgagaa

SEQ ID NO: 498 - DNA, 697 bp, Artificial Sequence
  Synthetic construct
cttatctggggaagctctgcttcagctgtgagcgcagaaggcaggactcgggacaatcttcatcatgacctgctcccctctcctcctcacccttctcattcactgcacagggtcctgggcccagtctgttttgacgcagccgcccgcagtgtctgcggccccaggacagaaaatcaccatctcctgctctggaaccaactccaatattggaactaaatatgtatcctggtaccagcagttcccgggaacagcccccaaactcctcatttatgacgataacaagcgaccctcagggattcctgaccgattctctggctccaagtctggcacgtcagccaccctgggcatcaccggactccagactggggacgaggccgattattactgcggaacttgggataccaacctgaacggtgtggttttcggcggagggaccacgttgaccgtcctgggtcagcccaaggctgccccctcggtcactctgttcccaccctcctctgaggagcttcaagccaacaaggccacactggtgtgtctcataagtgacttctacccgggagccgtgacagtggcctggaaggcagatagcagccccgtcaaggcgggagtggagaccaccacaccctccaaacaaagcaacaacaagtacgcggccagcagctacctgagcctgacgcctgagcagtggaagtcccac

SEQ ID NO: 499 - DNA, 694 bp, Artificial Sequence
  Synthetic construct
gggagagcccatatcaaagcctgggtcagagctctggagaagagctgctcagttaggacccagagggaaccatggaaaccccagcgcagctgctcttcctcctcctactctggctcccagattccaccggagaaattgttttgacgcagcctccaggcaccctgtctttgtctccaggagaaagggccaccctctcctgcagggccagtcagagtgttaccaactacttagcctggtaccagcagaaacctggccaggctcccaggctcctcatctatggtgcctctaatagggccactggcatccctgacaggttcagtggcactgggtctgggacagacttcactctcactatctccagactggagcctgaagactttgcggtgtattactgtcagcagtatggtagctcctccctcactttcggcggagggaccaaagttgagatcaaacgaactgtggctgcaccatctgtcttcatcttcccgccatctgatgagcagttgaaatctggaactgcctctgttgtgtgcctgctgaataacttctatcccagagaggccaaagtacagtggaaggtggataacgccctccaatcgggtaactcccaggagagtgtcacagagcaggacagcaaggacagcacctacagcctcagcagcaccctgacgctgagcaaagcagactacgagaa

SEQ ID NO: 500 - DNA, 726 bp, Artificial Sequence
  Synthetic construct
ggggctctcagagtatgaagagagggagagatctgggggaagctcagcttcagctgtgggtagagaagacaggactcaggacaatctccagcatggccagcttccctctcctcctcaccctcctcactcactgtgcagggtcctgggcccagtctgaactgactcagccaccctcagcgtctgggacccccggacagagggtcaccatctcttgttctggaagcagctccaatctcgggacttacagtgtaaattggtaccagcacctcccaggaacggcccccaaactcctcatttatactaataatcagcggccctcaggggtccctgaccgattctctggctccaagtctgacacctcagcctccctgtccatcagtgggctccagtctgaggatgaggctgaatattactgtgcagcatgggatgacggcctgaatgcttatgtcttcggaactgggaccaaagtgaccgtcctacgtcagcccaaggccaaccccactgtcactctgttcccgccctcctctgaggagctccaagccaacaaggccacactagtgtgtctgatcagtgacttctacccgggagctgtgacagtggcctggaaggcagatggcagccccgtcaaggcgggagtggagaccaccaaaccctccaaacagagcaacaacaagtacgcggccagcagctacctgagcctgacgcccgagcagtggaagtcccaca

SEQ ID NO: 501 - DNA, 780 bp, Artificial Sequence
  Synthetic construct
ggctcagggtggggtcacaaagctgggggggtctgatttgcatggatggactctccccctctcagagtatgaagagagggagagatctgggggaagctcagcttcagctgtgggtagagaagacaggactcaggacaatctccagcatggccagcttccctctcctcctcaccctcctcactcactgtgcagggtcctgggcccagtctgaactgactcagccaccctcagcgtctgggacccccggacagagggtcaccatctcttgttctggaagcagctccaatctcgggacttacagtgtaaattggtaccagcacctcccaggaacggcccccaaactcctcatttatactaataatcagcggccctcaggggtccctgaccgattctctggctccaagtctgacacctcagcctccctgtccatcagtgggctccagtctgaggatgaggctgaatattactgtgcagcatgggatgacggcctgaatgcttatgtcttcggaactgggaccaaagtgaccgtcctacgtcagcccaaggccaaccccactgtcactctgttcccgccctcctctgaggagctccaagccaacaaggccacactagtgtgtctgatcagtgacttctacccgggagctgtgacagtggcctggaaggcagatggcagccccgtcaaggcgggagtggagaccaccaaaccctccaaacagagcaacaacaagtacgcggccagcagctacctgagcctgacgcccgagcagtggaagtcccaca

SEQ ID NO: 502 - DNA, 778 bp, Artificial Sequence
  Synthetic construct
ggggagggtggggtcacaaagctgggggggtctgatttgcatggatggactctccccctctcagagtatgaagagagggagagatctgggggaagctcagcttcagctgtgggtagagaagacaggactcaggacaatctccagcatggccagcttccctctcctcctcaccctcctcactcactgtgcagggtcctgggcccagtctgaactgactcagccaccctcagcgtctgggacccccggacagagggtcaccatctcttgttctggaagcagctccaatctcgggacttacagtgtaaattggtaccagcacctcccaggaacggcccccaaactcctcatttatactaataatcagcggccctcaggggtccctgaccgattctctggctccaagtctgacacctcagcctccctgtccatcagtgggctccagtctgaggatgaggctgaatattactgtgcagcatgggatgacggcctgaatgcttatgtcttcggaactgggaccaaagtgaccgtcctacgtcagcccaaggccaaccccactgtcactctgttcccgccctcctctgaggagctccaagccaacaaggccacactagtgtgtctgatcagtgacttctacccgggagctgtgacagtggcctggaaggcagatggcagccccgtcaaggcgggagtggagaccaccaaaccctccaaacagagcaacaacaagtacgcggccagcagctacctgagcctgacgcccgagcagtggaagtcccac

SEQ ID NO: 503 - DNA, 773 bp, Artificial Sequence
  Synthetic construct
gggtggggtcacaaagctgggggggtctgatttgcatggatggactctccccctctcagagtatgaagagagggagagatctgggggaagctcagcttcagctgtgggtagagaagacaggactcaggacaatctccagcatggccagcttccctctcctcctcaccctcctcactcactgtgcagggtcctgggcccagtctgaactgactcagccaccctcagcgtctgggacccccggacagagggtcaccatctcttgttctggaagcagctccaatctcgggacttacagtgtaaattggtaccagcacctcccaggaacggcccccaaactcctcatttatactaataatcagcggccctcaggggtccctgaccgattctctggctccaagtctgacacctcagcctccctgtccatcagtgggctccagtctgaggatgaggctgaatattactgtgcagcatgggatgacggcctgaatgcttatgtcttcggaactgggaccaaagtgaccgtcctacgtcagcccaaggccaaccccactgtcactctgttcccgccctcctctgaggagctccaagccaacaaggccacactagtgtgtctgatcagtgacttctacccgggagctgtgacagtggcctggaaggcagatggcagccccgtcaaggcgggagtggagaccaccaaaccctccaaacagagcaacaacaagtacgcggccagcagctacctgagcctgacgcccgagcagtggaagtcccac

SEQ ID NO: 504 - DNA, 772 bp, Artificial Sequence
  Synthetic construct
ggggggtcacaaagctgggggggtctgatttgcatggatggactctccccctctcagagtatgaagagagggagagatctgggggaagctcagcttcagctgtgggtagagaagacaggactcaggacaatctccagcatggccagcttccctctcctcctcaccctcctcactcactgtgcagggtcctgggcccagtctgaactgactcagccaccctcagcgtctgggacccccggacagagggtcaccatctcttgttctggaagcagctccaatctcgggacttacagtgtaaattggtaccagcacctcccaggaacggcccccaaactcctcatttatactaataatcagcggccctcaggggtccctgaccgattctctggctccaagtctgacacctcagcctccctgtccatcagtgggctccagtctgaggatgaggctgaatattactgtgcagcatgggatgacggcctgaatgcttatgtcttcggaactgggaccaaagtgaccgtcctacgtcagcccaaggccaaccccactgtcactctgttcccgccctcctctgaggagctccaagccaacaaggccacactagtgtgtctgatcagtgacttctacccgggagctgtgacagtggcctggaaggcagatggcagccccgtcaaggcgggagtggagaccaccaaaccctccaaacagagcaacaacaagtacgcggccagcagctacctgagcctgacgcccgagcagtggaagtcccaca

SEQ ID NO: 505 - DNA, 778 bp, Artificial Sequence
  Synthetic construct
ctcagggtggggtcacaaagctgggggggtctgatttgcatggatggactctccccctctcagagtatgaagagagggagagatctgggggaagctcagcttcagctgtgggtagagaagacaggactcaggacaatctccagcatggccagcttccctctcctcctcaccctcctcactcactgtgcagggtcctgggcccagtctgaactgactcagccaccctcagcgtctgggacccccggacagagggtcaccatctcttgttctggaagcagctccaatctcgggacttacagtgtaaattggtaccagcacctcccaggaacggcccccaaactcctcatttatactaataatcagcggccctcaggggtccctgaccgattctctggctccaagtctgacacctcagcctccctgtccatcagtgggctccagtctgaggatgaggctgaatattactgtgcagcatgggatgacggcctgaatgcttatgtcttcggaactgggaccaaagtgaccgtcctacgtcagcccaaggccaaccccactgtcactctgttcccgccctcctctgaggagctccaagccaacaaggccacactagtgtgtctgatcagtgacttctacccgggagctgtgacagtggcctggaaggcagatggcagccccgtcaaggcgggagtggagaccaccaaaccctccaaacagagcaacaacaagtacgcggccagcagctacctgagcctgacgcccgagcagtggaagtcccaca

SEQ ID NO: 506 - DNA, 791 bp, Artificial Sequence
  Synthetic construct
ggagggcccagggtgggatcagaaagctggagggtctgatttgcatggatggaccctccttctctcagagtataaagaggggcagggagagacttggggaagctctgcttcagctgtgagcgcagaaggcaggactcgggacaatcttcatcatgacctgctcccctctcctcctcacccttctcattcactgcacagggtcctgggcccaatctgtgttgacgcagccgccctcagtgtctgcggccccaggacagagggtcaccatctcctgctctggaagcagctccaacattgggaataactatgtatcctggtatcagaagctcccaggaacagcccccaaactcctcatttatgacaacaataagcgaccctcaggaattcctgaccgaatctctgcctccaagtccggcacgtcagccaccctggtcatcatcggactccagactggggacgaggccgattattactgcggaacatgggacagcggcctgagtgctggcccttatgtcttcggaactgggaccaaggtcaccgtcctaggtcagcccaaggccaaccccactgtcactctgttcccgccctcctctgaggagctccaagccaacaaggccacactagtgtgtctgatcagtgacttctacccgggagctgtgacagtggcctggaaggcagatggcagccccgtcaaggcgggagtggagaccaccaaaccctccaaacagagcaacaacaagtacgcggccagcagctacctgagcctgacgcccgagcagtggaagtcccac

SEQ ID NO: 507 - DNA, 670 bp, Artificial Sequence
  Synthetic construct
atctggggaggagtcagtcccaaccaggacacagcatggacatgagggtccctgctcagctcctggggctcctgctgctctggctctcaggtgccagatgtgacatccagatgacccagtctccatcctccctgtctgcatctgtaggagacagagtcaccatcacttgccaggcgagtgaagacattaaaaattatttaaattggtatcaacagaaaccagggaaagccccaaaactcgtgatctacgatgcatccaatttggaaacaggggtcccatcaaggttcagtggaagtggatctgggagacattttactttaaccatcagcagcctgcagcctgaagattttgcaacatattactgtcaacagtatgataatttccctcctatagtcactttcggcggagggaccaaggtggatatcagacgaactgtggctgcaccatctgtcttcatcttcccgccatctgatgagcagttgaaatctggaactgcctctgttgtgtgcctgctgaataacttctatcccagagaggccaaagtacagtggaaggtggataacgccctccaatcgggtaactcccaggagagtgtcacagagcaggacagcaaggacagcacctacagcctcagcagcaccctgacgctgagcaaagcagactacgagaa

SEQ ID NO: 508 - DNA, 706 bp, Artificial Sequence
  Synthetic construct
gtttcttatatgggaagctctgcttcagctgtgagcgcagaaggcaggactcgggacaatcttcatcatgacctgctcccctctcctcctcacccttctcattcactgcacagggtcctgggcccaatctgtgttgacgcagccgccctcagtgtctgcggccccaggacagagggtcaccatctcctgctctggaagcagctccaacattgggaataactatgtatcctggtatcagaagctcccaggaacagcccccaaactcctcatttatgacaacaataagcgaccctcaggaattcctgaccgaatctctgcctccaagtccggcacgtcagccaccctggtcatcatcggactccagactggggacgaggccgattattactgcggaacatgggacagcggcctgagtgctggcccttatgtcttcggaactgggaccaaggtcaccgtcctaggtcagcccaaggccaaccccactgtcactctgttcccgccctcctctgaggagctccaagccaacaaggccacactagtgtgtctgatcagtgacttctacccgggagctgtgacagtggcctggaaggcagatggcagccccgtcaaggcgggagtggagaccaccaaaccctccaaacagagcaacaacaagtacgcggccagcagctacctgagcctgacgcccgagcagtggaagtcccac

SEQ ID NO: 509 - DNA, 687 bp, Artificial Sequence
  Synthetic construct
gagttttcggagtttcttatatgggaggagtcagtcccaaccaggacacagcatggacatgagggtccctgctcagctcctggggctcctgctgctctggctctcaggtgccagatgtgacatccagatgacccagtctccatcctccctgtctgcatctgtaggagacagagtcaccatcacttgccaggcgagtgaagacattaaaaattatttaaattggtatcaacagaaaccagggaaagccccaaaactcgtgatctacgatgcatccaatttggaaacaggggtcccatcaaggttcagtggaagtggatctgggagacattttactttaaccatcagcagcctgcagcctgaagattttgcaacatattactgtcaacagtatgataatttccctcctatagtcactttcggcggagggaccaaggtggatatcagacgaactgtggctgcaccatctgtcttcatcttcccgccatctgatgagcagttgaaatctggaactgcctctgttgtgtgcctgctgaataacttctatcccagagaggccaaagtacagtggaaggtggataacgccctccaatcgggtaactcccaggagagtgtcacagagcaggacagcaaggacagcacctacagcctcagcagcaccctgacgctgagcaaagcagactacgagaa

SEQ ID NO: 510 - DNA, 706 bp, Artificial Sequence
  Synthetic construct
gttcttagatggggaagctctgcttcagctgtgagcgcagaaggcaggactcgggacaatcttcatcatgacctgctcccctctcctcctcacccttctcattcactgcacagggtcctgggcccaatctgtgttgacgcagccgccctcagtgtctgcggccccaggacagagggtcaccatctcctgctctggaagcagctccaacattgggaataactatgtatcctggtatcagaagctcccaggaacagcccccaaactcctcatttatgacaacaataagcgaccctcaggaattcctgaccgaatctctgcctccaagtccggcacgtcagccaccctggtcatcatcggactccagactggggacgaggccgattattactgcggaacatgggacagcggcctgagtgctggcccttatgtcttcggaactgggaccaaggtcaccgtcctaggtcagcccaaggccaaccccactgtcactctgttcccgccctcctctgaggagctccaagccaacaaggccacactagtgtgtctgatcagtgacttctacccgggagctgtgacagtggcctggaaggcagatggcagccccgtcaaggcgggagtggagaccaccaaaccctccaaacagagcaacaacaagtacgcggccagcagctacctgagcctgacgcccgagcagtggaagtcccac

SEQ ID NO: 511 - DNA, 598 bp, Artificial Sequence
  Synthetic construct
tgggggagtcagtcccaaccaggacacagcatggacatgagggtccctgctcagctcctggggctcctgctgctctggctctcaggtgccagatgtgacatccagatgacccagtctccatcctccctgtctgcatctgtaggagacagagtcaccatcacttgccaggcgagtgaagacattaaaaattatttaaattggtatcaacagaaaccagggaaagccccaaaactcgtgatctacgatgcatccaatttggaaacaggggtcccatcaaggttcagtggaagtggatctgggagacattttactttaaccatcagcagcctgcagcctgaagattttgcaacatattactgtcaacagtatgataatttccctcctatagtcactttcggcggagggaccaaggtggatatcagacgaactgtggctgcaccatctgtcttcatcttcccgccatctgatgagcagttgaaatctggaactgcctctgttgtgtgcctgctgaataacttctatcccagagaggccaaagtacagtggaaggtggataacgccctccaatcgggtaactcccaggagagtgtcacagagc

SEQ ID NO: 512 - DNA, 799 bp, Artificial Sequence
  Synthetic construct
tatctggggctgagagcagaaaggggaggcagattgtctctgcagctgcaagcccagcacccgccccagctgctttgcatgtccctcccagccgccctgcagtccagagcccatatcaatgcctgggtcagagctctggagaagagctgctcagttaggacccagagggaaccatggaaaccccagcgcagcttctcttcctcctgctactctggctcccagagaccaccggagaaattgtgttgacgcagtctccaggcaccctgtctttgtctccaggggagagagccaccctctcgtgcagggccagtcagactgttaacaacaattacgtagcctggtaccagcagagacttggccaggctcccaggctcctcatccatggtgcatccaacagggccactggcgtcccagacaggttcagtggcagtgggtctgggacagacttcactctcaccatcagcggactggagcctgaagattttgcagtgtattactgtcagcagtatggaagtccacctcagacgttcggccaagggaccaaggtggaaaccaaacgaactgtggctgcaccatctgtcttcatcttcccgccatctgatgagcagttgaaatctggaactgcctctgttgtgtgcctgctgaataacttctatcccagagaggccaaagtacagtggaaggtggataacgccctccaatcgggtaactcccaggagagtgtcacagagcaggacagcaaggacagcacctacagcctcagcagcaccctgacgctgagcaaagcagactacgagaa

SEQ ID NO: 513 - DNA, 689 bp, Artificial Sequence
  Synthetic construct
ccgatatcggaatactttttcttatatgggagtcagtcccaaccaggacacagcatggacatgagggtccctgctcagctcctggggctcctgctgctctggctctcaggtgccagatgtgacatccagatgacccagtctccatcctccctgtctgcatctgtaggagacagagtcaccatcacttgccaggcgagtgaagacattaaaaattatttaaattggtatcaacagaaaccagggaaagccccaaaactcgtgatctacgatgcatccaatttggaaacaggggtcccatcaaggttcagtggaagtggatctgggagacattttactttaaccatcagcagcctgcagcctgaagattttgcaacatattactgtcaacagtatgataatttccctcctatagtcactttcggcggagggaccaaggtggatatcagacgaactgtggctgcaccatctgtcttcatcttcccgccatctgatgagcagttgaaatctggaactgcctctgttgtgtgcctgctgaataacttctatcccagagaggccaaagtacagtggaaggtggataacgccctccaatcgggtaactcccaggagagtgtcacagagcaggacagcaaggacagcacctacagcctcagcagcaccctgacgctgagcaaagcagactacgagaa

SEQ ID NO: 514 - DNA, 785 bp, Artificial Sequence
  Synthetic construct
gggggcccagggtgggatcagaaagctggagggtctgatttgcatggatggaccctccttctctcagagtataaagaggggcagggagagacttggggaagctctgcttcagctgtgagcgcagaaggcaggactcgggacaatcttcatcatgacctgctcccctctcctcctcacccttctcattcactgcacagggtcctgggcccagtctgtgttgacgcagccgccctcagtgtctgcggcctcaggacagaaggtcaccatctcctgctctggaagcagctccaatattgaaaataaatatgtctcgtggtaccagcagctccctggaacagcccccaaactcatcatttatgacaataataagcggccctctggtattcctgaccgattctctggctccaagtctggcacgtcagcctccctggccatcagcgggctccagactgacgacgaggccgattattactgcggatcatgggataccagcctgagtggtgtggtttttggcggagggacccacctgaccgtccttggtcagcccaaggctgccccctcggtcactctgttcccgccctcctctgaggagcttcaagccaacaaggccacactggtctgtctcataagtgacttctacccgggagccgtgacagtggcctggaaggcagatagcagccccgtcaaggcgggagtggagaccaccacaccctccaaacaaagcaacaacaagtacgcggccagcagctacctgagcctgacgcctgagcagtggaagtcccaca

SEQ ID NO: 515 - DNA, 695 bp, Artificial Sequence
  Synthetic construct
tctatggggaagctctgcttcagctgtgagcgcagaaggcaggactcgggacaatcttcatcatgacctgctcccctctcctcctcacccttctcattcactgcacagggtcctgggcccagtctgtgttgacgcagccgccctcagtgtctgcggcctcaggacagaaggtcaccatctcctgctctggaagcagctccaatattgaaaataaatatgtctcgtggtaccagcagctccctggaacagcccccaaactcatcatttatgacaataataagcggccctctggtattcctgaccgattctctggctccaagtctggcacgtcagcctccctggccatcagcgggctccagactgacgacgaggccgattattactgcggatcatgggataccagcctgagtggtgtggtttttggcggagggacccacctgaccgtccttggtcagcccaaggctgccccctcggtcactctgttcccgccctcctctgaggagcttcaagccaacaaggccacactggtctgtctcataagtgacttctacccgggagccgtgacagtggcctggaaggcagatagcagccccgtcaaggcgggagtggagaccaccacaccctccaaacaaagcaacaacaagtacgcggccagcagctacctgagcctgacgcctgagcagtggaagtcccac

SEQ ID NO: 516 - DNA, 699 bp, Artificial Sequence
  Synthetic construct
tcttatctggggaagctctgcttcagctgtgagcgcagaaggcaggactcgggacaatcttcatcatgacctgctcccctctcctcctcacccttctcattcactgcacagggtcctgggcccagtctgtgttgacgcagccgccctcagtgtctgcggcctcaggacagaaggtcaccatctcctgctctggaagcagctccaatattgaaaataaatatgtctcgtggtaccagcagctccctggaacagcccccaaactcatcatttatgacaataataagcggccctctggtattcctgaccgattctctggctccaagtctggcacgtcagcctccctggccatcagcgggctccagactgacgacgaggccgattattactgcggatcatgggataccagcctgagtggtgtggtttttggcggagggacccacctgaccgtccttggtcagcccaaggctgccccctcggtcactctgttcccgccctcctctgaggagcttcaagccaacaaggccacactggtctgtctcataagtgacttctacccgggagccgtgacagtggcctggaaggcagatagcagccccgtcaaggcgggagtggagaccaccacaccctccaaacaaagcaacaacaagtacgcggccagcagctacctgagcctgacgcctgagcagtggaagtcccaca

SEQ ID NO: 517 - DNA, 695 bp, Artificial Sequence
  Synthetic construct
tatctggggaagctctgcttcagctgtgagcgcagaaggcaggactcgggacaatcttcatcatgacctgctcccctctcctcctcacccttctcattcactgcacagggtcctgggcccagtctgtgttgacgcagccgccctcagtgtctgcggcctcaggacagaaggtcaccatctcctgctctggaagcagctccaatattgaaaataaatatgtctcgtggtaccagcagctccctggaacagcccccaaactcatcatttatgacaataataagcggccctctggtattcctgaccgattctctggctccaagtctggcacgtcagcctccctggccatcagcgggctccagactgacgacgaggccgattattactgcggatcatgggataccagcctgagtggtgtggtttttggcggagggacccacctgaccgtccttggtcagcccaaggctgccccctcggtcactctgttcccgccctcctctgaggagcttcaagccaacaaggccacactggtctgtctcataagtgacttctacccgggagccgtgacagtggcctggaaggcagatagcagccccgtcaaggcgggagtggagaccaccacaccctccaaacaaagcaacaacaagtacgcggccagcagctacctgagcctgacgcctgagcagtggaagtcccac

SEQ ID NO: 518 - DNA, 701 bp, Artificial Sequence
  Synthetic construct
tttctgagatggggaagctctgcttcagctgtgagcgcagaaggcaggactcgggacaatcttcatcatgacctgctcccctctcctcctcacccttctcattcactgcacagggtcctgggcccagtctgtgttgacgcagccgccctcagtgtctgcggcctcaggacagaaggtcaccatctcctgctctggaagcagctccaatattgaaaataaatatgtctcgtggtaccagcagctccctggaacagcccccaaactcatcatttatgacaataataagcggccctctggtattcctgaccgattctctggctccaagtctggcacgtcagcctccctggccatcagcgggctccagactgacgacgaggccgattattactgcggatcatgggataccagcctgagtggtgtggtttttggcggagggacccacctgaccgtccttggtcagcccaaggctgccccctcggtcactctgttcccgccctcctctgaggagcttcaagccaacaaggccacactggtctgtctcataagtgacttctacccgggagccgtgacagtggcctggaaggcagatagcagccccgtcaaggcgggagtggagaccaccacaccctccaaacaaagcaacaacaagtacgcggccagcagctacctgagcctgacgcctgagcagtggaagtcccaca

SEQ ID NO: 519 - DNA, 704 bp, Artificial Sequence
  Synthetic construct
tagatggggaagctctgcttcagctgtgagcgcagaaggcaggactcgggacaatcttcatcatgacctgctcccctctcctcctcacccttctcattcactgcacagggtcctgggcccagtctgtgttgacgcagccgccctcagtgtctgcggcctcaggacagaaggtcaccatctcctgctctggaagcagctccaatattgaaaataaatatgtctcgtggtaccagcagctccctggaacagcccccaaactcatcatttatgacaataataagcggccctctggtattcctgaccgattctctggctccaagtctggcacgtcagcctccctggccatcagcgggctccagactgacgacgaggccgattattactgcggatcatgggataccagcctgagtggtgtggtttttggcggagggacccacctgaccgtccttggtcagcccaaggctgccccctcggtcactctgttcccgccctcctctgaggagcttcaagccaacaaggccacactggtctgtctcataagtgacttctacccgggagccgtgacagtggcctggaaggcagatagcagccccgtcaaggcgggagtggagaccaccacaccctccaaacaaagcaacaacaagtacgcggccagcagctacctgagcctgacgcctgagcagtggaagtcccacaaaagctac

SEQ ID NO: 520 - DNA, 704 bp, Artificial Sequence
  Synthetic construct
acttgctttcttatatggggaagctctgcttcagctgtgagcgcagaaggcaggactcgggacaatcttcatcatgacctgctcccctctcctcctcacccttctcattcactgcacagggtcctgggcccagtctgtgttgacgcagccgccctcagtgtctgcggcctcaggacagaaggtcaccatctcctgctctggaagcagctccaatattgaaaataaatatgtctcgtggtaccagcagctccctggaacagcccccaaactcatcatttatgacaataataagcggccctctggtattcctgaccgattctctggctccaagtctggcacgtcagcctccctggccatcagcgggctccagactgacgacgaggccgattattactgcggatcatgggataccagcctgagtggtgtggtttttggcggagggacccacctgaccgtccttggtcagcccaaggctgccccctcggtcactctgttcccgccctcctctgaggagcttcaagccaacaaggccacactggtctgtctcataagtgacttctacccgggagccgtgacagtggcctggaaggcagatagcagccccgtcaaggcgggagtggagaccaccacaccctccaaacaaagcaacaacaagtacgcggccagcagctacctgagcctgacgcctgagcagtggaagtccc

SEQ ID NO: 521 - DNA, 695 bp, Artificial Sequence
  Synthetic construct
atctggggaagctctgcttcagctgtgagcgcagaaggcaggactcgggacaatcttcatcatgacctgctcccctctcctcctcacccttctcattcactgcacagggtcctgggcccagtctgtgttgacgcagccgccctcagtgtctgcggcctcaggacagaaggtcaccatctcctgctctggaagcagctccaatattgaaaataaatatgtctcgtggtaccagcagctccctggaacagcccccaaactcatcatttatgacaataataagcggccctctggtattcctgaccgattctctggctccaagtctggcacgtcagcctccctggccatcagcgggctccagactgacgacgaggccgattattactgcggatcatgggataccagcctgagtggtgtggtttttggcggagggacccacctgaccgtccttggtcagcccaaggctgccccctcggtcactctgttcccgccctcctctgaggagcttcaagccaacaaggccacactggtctgtctcataagtgacttctacccgggagccgtgacagtggcctggaaggcagatagcagccccgtcaaggcgggagtggagaccaccacaccctccaaacaaagcaacaacaagtacgcggccagcagctacctgagcctgacgcctgagcagtggaagtcccaca

SEQ ID NO: 522 - DNA, 696 bp, Artificial Sequence
  Synthetic construct
gatatggggaagctctgcttcagctgtgagcgcagaaggcaggactcgggacaatcttcatcatgacctgctcccctctcctcctcacccttctcattcactgcacagggtcctgggcccagtctgtgttgacgcagccgccctcagtgtctgcggcctcaggacagaaggtcaccatctcctgctctggaagcagctccaatattgaaaataaatatgtctcgtggtaccagcagctccctggaacagcccccaaactcatcatttatgacaataataagcggccctctggtattcctgaccgattctctggctccaagtctggcacgtcagcctccctggccatcagcgggctccagactgacgacgaggccgattattactgcggatcatgggataccagcctgagtggtgtggtttttggcggagggacccacctgaccgtccttggtcagcccaaggctgccccctcggtcactctgttcccgccctcctctgaggagcttcaagccaacaaggccacactggtctgtctcataagtgacttctacccgggagccgtgacagtggcctggaaggcagatagcagccccgtcaaggcgggagtggagaccaccacaccctccaaacaaagcaacaacaagtacgcggccagcagctacctgagcctgacgcctgagcagtggaagtcccaca

SEQ ID NO: 523 - DNA, 695 bp, Artificial Sequence
  Synthetic construct
tagatggggaagctctgcttcagctgtgagcgcagaaggcaggactcgggacaatcttcatcatgacctgctcccctctcctcctcacccttctcattcactgcacagggtcctgggcccagtctgtgttgacgcagccgccctcagtgtctgcggcctcaggacagaaggtcaccatctcctgctctggaagcagctccaatattgaaaataaatatgtctcgtggtaccagcagctccctggaacagcccccaaactcatcatttatgacaataataagcggccctctggtattcctgaccgattctctggctccaagtctggcacgtcagcctccctggccatcagcgggctccagactgacgacgaggccgattattactgcggatcatgggataccagcctgagtggtgtggtttttggcggagggacccacctgaccgtccttggtcagcccaaggctgccccctcggtcactctgttcccgccctcctctgaggagcttcaagccaacaaggccacactggtctgtctcataagtgacttctacccgggagccgtgacagtggcctggaaggcagatagcagccccgtcaaggcgggagtggagaccaccacaccctccaaacaaagcaacaacaagtacgcggccagcagctacctgagcctgacgcctgagcagtggaagtcccac

SEQ ID NO: 524 - DNA, 794 bp, Artificial Sequence
  Synthetic construct
ttttatggggggggcccagggtgggatcagaaagctggagggtctgatttgcatggatggaccctccttctctcagagtataaagaggggcagggagagacttggggaagctctgcttcagctgtgagcgcagaaggcaggactcgggacaatcttcatcatgacctgctcccctctcctcctcacccttctcattcactgcacagggtcctgggcccagtctgtgttgacgcagccgccctcagtgtctgcggcctcaggacagaaggtcaccatctcctgctctggaagcagctccaatattgaaaataaatatgtctcgtggtaccagcagctccctggaacagcccccaaactcatcatttatgacaataataagcggccctctggtattcctgaccgattctctggctccaagtctggcacgtcagcctccctggccatcagcgggctccagactgacgacgaggccgattattactgcggatcatgggataccagcctgagtggtgtggtttttggcggagggacccacctgaccgtccttggtcagcccaaggctgccccctcggtcactctgttcccgccctcctctgaggagcttcaagccaacaaggccacactggtctgtctcataagtgacttctacccgggagccgtgacagtggcctggaaggcagatagcagccccgtcaaggcgggagtggagaccaccacaccctccaaacaaagcaacaacaagtacgcggccagcagctacctgagcctgacgcctgagcagtggaagtcccaca

SEQ ID NO: 525 - DNA, 712 bp, Artificial Sequence
  Synthetic construct
ctcctgtcctgatttcttatatggggaagctctgcttcagctgtgagcgcagaaggcaggactcgggacaatcttcatcatgacctgctcccctctcctcctcacccttctcattcactgcacagggtcctgggcccagtctgtgttgacgcagccgccctcagtgtctgcggcctcaggacagaaggtcaccatctcctgctctggaagcagctccaatattgaaaataaatatgtctcgtggtaccagcagctccctggaacagcccccaaactcatcatttatgacaataataagcggccctctggtattcctgaccgattctctggctccaagtctggcacgtcagcctccctggccatcagcgggctccagactgacgacgaggccgattattactgcggatcatgggataccagcctgagtggtgtggtttttggcggagggacccacctgaccgtccttggtcagcccaaggctgccccctcggtcactctgttcccgccctcctctgaggagcttcaagccaacaaggccacactggtctgtctcataagtgacttctacccgggagccgtgacagtggcctggaaggcagatagcagccccgtcaaggcgggagtggagaccaccacaccctccaaacaaagcaacaacaagtacgcggccagcagctacctgagcctgacgcctgagcagtggaagtcccac

SEQ ID NO: 526 - DNA, 696 bp, Artificial Sequence
  Synthetic construct
tagatggggaagctctgcttcagctgtgagcgcagaaggcaggactcgggacaatcttcatcatgacctgctcccctctcctcctcacccttctcattcactgcacagggtcctgggcccagtctgtgttgacgcagccgccctcagtgtctgcggcctcaggacagaaggtcaccatctcctgctctggaagcagctccaatattgaaaataaatatgtctcgtggtaccagcagctccctggaacagcccccaaactcatcatttatgacaataataagcggccctctggtattcctgaccgattctctggctccaagtctggcacgtcagcctccctggccatcagcgggctccagactgacgacgaggccgattattactgcggatcatgggataccagcctgagtggtgtggtttttggcggagggacccacctgaccgtccttggtcagcccaaggctgccccctcggtcactctgttcccgccctcctctgaggagcttcaagccaacaaggccacactggtctgtctcataagtgacttctacccgggagccgtgacagtggcctggaaggcagatagcagccccgtcaaggcgggagtggagaccaccacaccctccaaacaaagcaacaacaagtacgcggccagcagctacctgagcctgacgcctgagcagtggaagtcccaca

SEQ ID NO: 527 - DNA, 700 bp, Artificial Sequence
  Synthetic construct
tttcgtagatggggaagctctgcttcagctgtgagcgcagaaggcaggactcgggacaatcttcatcatgacctgctcccctctcctcctcacccttctcattcactgcacagggtcctgggcccagtctgtgttgacgcagccgccctcagtgtctgcggcctcaggacagaaggtcaccatctcctgctctggaagcagctccaatattgaaaataaatatgtctcgtggtaccagcagctccctggaacagcccccaaactcatcatttatgacaataataagcggccctctggtattcctgaccgattctctggctccaagtctggcacgtcagcctccctggccatcagcgggctccagactgacgacgaggccgattattactgcggatcatgggataccagcctgagtggtgtggtttttggcggagggacccacctgaccgtccttggtcagcccaaggctgccccctcggtcactctgttcccgccctcctctgaggagcttcaagccaacaaggccacactggtctgtctcataagtgacttctacccgggagccgtgacagtggcctggaaggcagatagcagccccgtcaaggcgggagtggagaccaccacaccctccaaacaaagcaacaacaagtacgcggccagcagctacctgagcctgacgcctgagcagtggaagtcccac

SEQ ID NO: 528 - DNA, 696 bp, Artificial Sequence; identical to SEQ ID NO: 526
  Synthetic construct

SEQ ID NO: 529 - DNA, 859 bp, Artificial Sequence
  Synthetic construct
ggggcttttctattcatacaattacacattctgtgatgatatttttggctcttgatttacattgggtactttcacaacccactgctcatgaaatttgcttttgtactcactggttgtttttgcataggcccctccaggccacgaccagctgtttggattttataaacgggccgtttgcattgtgaactgagctacaacaggcaggcaggggcagcaagatggtgttgcagacccaggtcttcatttctctggtgctctggatctctggtgcctccggggacatcgtgatgacgcagcctgcagactctctgactgtgtctctgggcgagagggccaccatcaactgcaggtccaaccagagtcttctatatagcttcaacaataagaactacttagcttggtatagccagaaacctggccagcctcctaaactcctcatttcgtgggcatctacccgggaatctggggtccctgaccgcttcagtggcagcggttctgggactgatttcgctctcaccatcaacaggctgcaggctgaagatgtggcagtttattattgtcagcaatattttagtatccctcttactttcggcggagggaccaaggtggagatcaaacgaactgtggctgcaccatctgtcttcatcttcccgccatctgatgagcagttgaaatctggaactgcctctgttgtgtgcctgctgaataacttctatcccagagaggccaaagtacagtggaaggtggataacgccctccaatcgggtaactcccaggagagtgtcacagagcaggacagcaaggacagcacctacagcctcagcagcaccctgacgctgagcaaagcagactacgagaa

SEQ ID NO: 530 - DNA, 690 bp, Artificial Sequence
  Synthetic construct
ttatctgggggctggggtctcaggaggcagcactctcgggacgtctccaccatggcctgggctctgctcctcctcaccctcctcactcagggcacaggatcctgggctcagtctgccctgactcagcctcgctcagtgtccgggtctcctggacagtcagtcaccatctcctgcactggattcagcactgattttggtgatattgactctgtctcctggtaccaacagcgcccagacaaagcccccaaactcatcatttatgatgtcactaagcggccctcaggggtccctgatcgcttctctggctccaagtctggcaacacggcctccctgaccatctctggcctccaggctgaggatgagggtgattattactgctgctcatatgtcggcacctacactgacctttatgtcttcgcaactgggacccaggtcaccgtcctaggtcagcccaaggccaaccccactgtcactctgttcccgccctcctctgaggagctccaagccaacaaggccacactagtgtgtctgatcagtgacttctacccgggagctgtgacagtggcctggaaggcagatggcagccccgtcaaggcgggagtggagaccaccaaaccctccaaacagagcaacaacaagtacgcggccagcagctacctgagcctgacgcccgagcagtggaagtcccac

SEQ ID NO: 531 - DNA, 773 bp, Artificial Sequence
  Synthetic construct
agaaagctgggggtctgatttgcatggatggaccctcccactctcagagtatgaagaggggcagggagagatttggggaggctctgcttcagctgtgggcacaagaggcagcactcaggacaatctccagcatggcctggtctcctctcctcctcactctcctcgctcactgcacagggtcctgggcccaatctgcactgacgcagccgccctcagtgtctggggccccagggcagacggtcacgatctcctgcactgggagcaggtccaacatcggggcaggttatgatgtacactggtaccggcaatttccaggaacagcgcccaaactcctcatctatggtaccaataatcggccctcaggggtccctgcccgaatctctggctccaagtctggcacctcagcctccctgaccatcactgggctccaggctgatgatgaggctgattattactgccagtcccatgacatcactttgagtggttccgatgtggttttcggcggagggaccaagctgaccgtcctcggtcagcccaaggctgccccctcggtcactctgttcccgccctcctctgaggagcttcaagccaacaaggccacactggtgtgtctcataagtgacttctacccgggagccgtgacagtggcctggaaggcagatagcagccccgtcaaggcgggagtggagaccaccacaccctccaaacaaagcaacaacaagtacgcggccagcagctatctgagcctgacgcctgagcagtggaagtcccac

SEQ ID NO: 532 - DNA, 689 bp, Artificial Sequence
  Synthetic construct
tctatgggggctggggtctcaggaggcagcactctcgggacgtctccaccatggcctgggctctgctcctcctcagcctcctcactcagggcacaggatcctgggctcagtctgccctgactcagcctcactcagtgtccgggtctcctggacagtcagtcaccatcacctgcactggaaccagcaatagtcttggtgataataattttgtctcctggtaccaacaacaaccggacaaggcccccaaactcctgatctatgatgtcactaagcggccctcaggggtccctgatcgcttctctggctccaagtctgccaacacggcctccctgaccatctctgggctccaggctgaggatgagggtgattattactgctgctcatatgctgacagttatctttccctttatgtcttcggacctgggacctcggtcaccgtcctacgtcagcccaaggccaaccccactgtcactctgttcccgccctcctctgaggagctccaagccaacaaggccacactagtgtgtctgatcagtgacttctacccgggagctgtgacagtggcctggaaggcagatggcagccccgtcaaggcgggagtggagaccaccaaaccctccaaacagagcaacaacaagtacgcggccagcagctacctgagcctgacgcccgagcagtggaagtcccac

SEQ ID NO: 533 - DNA, 686 bp, Artificial Sequence
  Synthetic construct
ggggaggctgatcacaccctgtgcaggagtcagacccagtcaggacacagcatggacatgagggtccccgctcagctcctggggctcctgctgctctggttcccaggttccagatgcgacatcgaggtgacccagtctccatcttccgtgtctgcatctgtaggagacacagtcaccctcacttgtcgggcgagtcagggtattagtagctggttaggctggtatcagcagaaagcaggaaaagcccctaagctcctgatctacgatacattcaatttgcaaagtggagtcccatcaagattcagtggcagtaaatctgggacagacttcactctcaccatcagagacctgcagcctgacgattttgcaacttactattgtcaacagtccaccggtttccctccgggggtcactttcggccctgggaccaaggtggatgtcaaacgaactgtggctgcaccatctgtcttcatcttcccgccatctgatgagcagttgaaatctggaactgcctctgttgtgtgcctgctgaataacttctatcccagagaggccaaagtacagtggaaggtggataacgccctccaatcgggtaactcccaggagagtgtcacagagcaggacagcaaggacagcacctacagcctcagcagcaccctgacgctgagcaaagcagactacgagaa

SEQ ID NO: 534 - DNA, 773 bp, Artificial Sequence
  Synthetic construct
gatgaaatttgcttttgtactcactggttgtttttgcataggcccctccaggccacgaccagctgtttggattttataaacgggccgtttgcattgtgaactgagctacaacaggcaggcaggggcagcaagatggtgttgcagacccaggtcttcatttctctggtgctctggatctctggtgcctccggggacatcgtgatgacgcagcctgcagactctctgactgtgtctctgggcgagagggccaccatcaactgcaggtccaaccagagtcttctatatagcttcaacaataagaactacttagcttggtatagccagaaacctggccagcctcctaaactcctcatttcgtgggcatctacccgggaatctggggtccctgaccgcttcagtggcagcggttctgggactgatttcgctctcaccatcaacaggctgcaggctgaagatgtggcagtttattattgtcagcaatattttagtatccctcttactttcggcggagggaccaaggtggagatcaaacgaactgtggctgcaccatctgtcttcatcttcccgccatctgatgagcagttgaaatctggaactgcctctgttgtgtgcctgctgaataacttctatcccagagaggccaaagtacagtggaaggtggataacgccctccaatcgggtaactcccaggagagtgtcacagagcaggacagcaaggacagcacctacagcctcagcagcaccctgacgctgagcaaagcagactacgagaa

SEQ ID NO: 535 - DNA, 747 bp, Artificial Sequence
  Synthetic construct
gggggaccctcccactctcagagtatgaagaggggcagggagagatttggggaggctctgcttcagctgtgggcacaagaggcagcactcaggacaatctccagcatggcctggtctcctctcctcctcactctcctcgctcactgcacagggtcctgggcccaatctgcactgacgcagccgccctcagtgtctggggccccagggcagacggtcacgatctcctgcactgggagcaggtccaacatcggggcaggttatgatgtacactggtaccggcaatttccaggaacagcgcccaaactcctcatctatggtaccaataatcggccctcaggggtccctgcccgaatctctggctccaagtctggcacctcagcctccctgaccatcactgggctccaggctgatgatgaggctgattattactgccagtcccatgacatcactttgagtggttccgatgtggttttcggcggagggaccaagctgaccgtcctcggtcagcccaaggctgccccctcggtcactctgttcccgccctcctctgaggagcttcaagccaacaaggccacactggtgtgtctcataagtgacttctacccgggagccgtgacagtggcctggaaggcagatagcagccccgtcaaggcgggagtggagaccaccacaccctccaaacaaagcaacaacaagtacgcggccagcagctatctgagcctgacgcctgagcagtggaagtcccac

SEQ ID NO: 536 - DNA, 778 bp, Artificial Sequence
  Synthetic construct
cggggggtggggtcacacagctgggggggtctgatttgcatggatggactctccccctctcagagtatgaagagagggagagatctgggggaagctcagcttcagctgtgggtagagaagacaggactcaggacaatctccagcatggccagcttccctctcctcctcaccctcctcactcactgtgcagggtcctgggcccagtctctactgactcagccaccctcagcgtctgggacccccggacagagggtcaccatctcttgttctggaagcagctccaacatcgggacttatagtgtaaattggtaccagcacctcccaggaacggcccccaaactcctcatttatactaataatcagcgggcctcaggggtccctgaccgattctctggctccaagtctggcacctcagcctccctgtccatcagtgggctccagtctgacgatgaggctgagtattactgtgcagcctgggatgacggcctgaatgcttatgtcttcggaactgggaccacagtgaccgtcctacgtcagcccaaggccaaccccactgtcactctgttcccgccctcctctgaggagctccaagccaacaaggccacactagtgtgtctgatcagtgacttctacccgggagctgtgacagtggcctggaaggcagatggcagccccgtcaaggcgggagtggagaccaccaaaccctccaaacagagcaacaacaagtacgcggccagcagctacctgagcctgacgcccgagcagtggaagtcccaca

SEQ ID NO: 537 - DNA, 785 bp, Artificial Sequence
  Synthetic construct
tttcttctctggggtggggtcacacagctgggggggtctgatttgcatggatggactctccccctctcagagtatgaagagagggagagatctgggggaagctcagcttcagctgtgggtagagaagacaggactcaggacaatctccagcatggccagcttccctctcctcctcaccctcctcactcactgtgcagggtcctgggcccagtctctactgactcagccaccctcagcgtctgggacccccggacagagggtcaccatctcttgttctggaagcagctccaacatcgggacttatagtgtaaattggtaccagcacctcccaggaacggcccccaaactcctcatttatactaataatcagcgggcctcaggggtccctgaccgattctctggctccaagtctggcacctcagcctccctgtccatcagtgggctccagtctgacgatgaggctgagtattactgtgcagcctgggatgacggcctgaatgcttatgtcttcggaactgggaccacagtgaccgtcctacgtcagcccaaggccaaccccactgtcactctgttcccgccctcctctgaggagctccaagccaacaaggccacactagtgtgtctgatcagtgacttctacccgggagctgtgacagtggcctggaaggcagatggcagccccgtcaaggcgggagtggagaccaccaaaccctccaaacagagcaacaacaagtacgcggccagcagctacctgagcctgacgcccgagcagtggaagtcccaca

SEQ ID NO: 538 - DNA, 667 bp, Artificial Sequence
  Synthetic construct
ggggaggctggtcacacctgtgcaggagtcagtcccagtcaggacacagcatggacatgagggtccccgctcagctcctggggctcctgctgctctggctcccaggtgccagatgtgacatccagttgacccagtctccagccttcctgtctgcatctgtaggagacagaatcaccatcacttgccgggccagtgagggcattaataattatttagcctggtatcagcaaaaaccagggaaagcccctaacctcctgatctatgctgcatccactttacaaactggagtcccatcaaggttcagcggcagtggatctgggacagaattcactctcacaatccgcagcctgcagcctgaagatttcgcaacttattactgtcaacaacttggccactttggccaggggaccaaggtggacttcaaacgaactgtggctgcaccatctgtcttcatcttcccgccatctgatgagcagttgaaatctggaactgcctctgttgtgtgcctgctgaataacttctatcccagagaggccaaagtacagtggaaggtggataacgccctccaatcgggtaactcccaggagagtgtcacagagcaggacagcaaggacagcacctacagcctcagcagcaccctgacgctgagcaaagcagactacgagaa

SEQ ID NO: 539 - DNA, 700 bp, Artificial Sequence
  Synthetic construct
tatctgggagctgtaactgtgccttgactgatcaggactcctcagttcaccttctcacaatgaggctccctgctcagctcctggggctgctaatgctctgggtctctggatccactggggatattgtgatgactcagtctcctctctccctggccgtcacacttggagagccggccgccctgtcctgcaggtctagtcagagcctcctgcagtacaacggacgcaactatgtggattggtatttgcagaagccagggcagtctccacaactcctgatctatttgggttctcatcgggcctccggggtccccgacaggttcagtggcagtggatcaggcaaagattttacactgaaaatcagtagagtggaggctgaggacattggggtttattactgcatggaaactctacagactccacgactcactttcggcggagggaccaaggtcgagatcaaacgaactgtggctgcaccatctgtcttcatcttcccgccatctgatgagcagttgaaatctggaactgcctctgttgtgtgcctgctgaataacttctatcccagagaggccaaagtacagtggaaggtggataacgccctccaatcgggtaactcccaggagagtgtcacagagcaggacagcaaggacagcacctacagcctcagcagcaccctgacgctgagcaaagcagactacgagaa

SEQ ID NO: 540 - DNA, 697 bp, Artificial Sequence
  Synthetic construct
gggagagcccatatcaatgcctgggtcagagctctggagaagagctgctcagttaggacccagagggaaccatggaaaccccagcgcagcttctcttcctcctgctactctggctcccagataccaccggagaaattgtgctgacgcagtctccaggcaccctgtctttgtctccaggggaaagagccaccctctcgtgcagggccagtcaaactgttaccaacgattacttagcctggtaccagcagaaacttggccaggctcccaggctcctcatccatagtgcatcgtacagggccactggcatcccagacaggttcagtggcagtgggtctgggacagacttcactctcaccatcagcggactggagtctgaagattttgcagtgtattactgtcagcagtatggcagtcctcctcagacgttcggccaagggaccaaggtggaaaccaaacgaactgtggctgcaccatctgtcttcatcttcccgccatctgatgagcagttgaaatctggaactgcctctgttgtgtgcctgctgaataacttctatcccagagaggccaaagtacagtggaaggtggataacgccctccaatcgggtaactcccaggagagtgtcacagagcaggacagcaaggacagcacctacagcctcagcagcaccctgacgctgagcaaagcagactacgagaa

SEQ ID NO: 541 - DNA, 670 bp, Artificial Sequence
  Synthetic construct
ggggtcagagccctggggaggaactgctcagttaggacccagagggaaccatggaagccccagctcagcttctcttcctcctgctactctggctcccagagaccaccggacagactatgttgacgcagtctccagccaccctgtctttgtctccaggggagagagccaccctctcctgcagggccagtcagaatattaacaatggcttagcctggtatcaacaaaaacctggccaggctcccaggctgctcatctttgatgcatccgacagggccactgacgtcccagccaggttcagcggcagtgggtctgggacagacttcactctcaccatcagcagcctagagcctgaagattttgcagtatattactgtcaacaacatagcaacttattcactttcggccctgggaccaaagtggatatgaaacgaactgtggctgcaccatctgtcttcatcttcccgccatctgatgagcagttgaaatctggaactgcctctgttgtgtgcctgctgaataacttctatcccagagaggccaaagtacagtggaaggtggataacgccctccaatcgggtaactcccaggagagtgtcacagagcaggacagcaaggacagcacctacagcctcagcagcaccctgacgctgagcaaagcagactacgagaa

SEQ ID NO: 542 - DNA, 802 bp, Artificial Sequence
  Synthetic construct
gggcatgggctgctgagagcagaaaggggaggcagattgtctctgcagctgcaagcccagcacccgccccagctgctttgcatgtccctcccagccgccctgcagtccagagcccatatcaatgcctgggtcagagctctggagaagagctgctcagttaggacccagagggaaccatggaaaccccagcgcagcttctcttcctcctgctactctggctcccagataccaccggagaaattgtgctgacgcagtctccaggcaccctgtctttgtctccaggggaaagagccaccctctcgtgcagggccagtcaaactgttaccaacgattacttagcctggtaccagcagaaacttggccaggctcccaggctcctcatccatagtgcatcgtacagggccactggcatcccagacaggttcagtggcagtgggtctgggacagacttcactctcaccatcagcggactggagtctgaagattttgcagtgtattactgtcagcagtatggcagtcctcctcagacgttcggccaagggaccaaggtggaaaccaaacgaactgtggctgcaccatctgtcttcatcttcccgccatctgatgagcagttgaaatctggaactgcctctgttgtgtgcctgctgaataacttctatcccagagaggccaaagtacagtggaaggtggataacgccctccaatcgggtaactcccaggagagtgtcacagagcaggacagcaaggacagcacctacagcctcagcagcaccctgacgctgagcaaagcagactacgagaa

SEQ ID NO: 543 - DNA, 661 bp, Artificial Sequence
  Synthetic construct
gggggagaagtctctctcagtcaggacacagcatggacatgagggtccctgctcagctcctgggactcctgctgctctggctcccaggctccagttgtgacatccaggtgacccagtctccatcctccctgtctgcatctgttggagacagagtcaccatcacttgccgggcgagtcagggcattatgaattttttagcctggtatcagcacaaaccagggatggttccgaaactcctgatctctgcagcatccactttgcaatctggggtcccttctcggttcagtggcagtggatctgggacagatttcactctcatcatcagcggcctgcagcctgaagatgttggaacttattactgtcaaaaatataacactgccccgtggacgttcggccaggggaccaaagtgaatatcaaacgaactgtggctgcaccatctgtcttcatcttcccgccatctgatgagcagttgaaatctggaactgcctctgttgtgtgcctgctgaataacttctatcccagagaggccaaagtacagtggaaggtggataacgccctccaatcgggtaactcccaggagagtgtcacagagcaggacagcaaggacagcacctacagcctcagcagcaccctgacgctgagcaaagcagactacgagaa

SEQ ID NO: 544 - DNA, 1011 bp, Artificial Sequence
  Synthetic construct
gacttcattagacattccctacgaatggttatactctcctgtatactcccaatacaactctaaaatatattattccatatagtccttaggtttgtattaaagtttgacttttttccttcaaaatatctcttgtcacaacagcggctctagagagaaatacattccctccaggcaaatctatgctgcgctggtctgacctgggaccctggggacattgcccctgtgctgagttactaagatgagccagccctgcagctgtgctcagcctgccccatgccctgctgattgatttgcatgttccagagcacagcctcctgccctgaagacttttttatgggctggtcgcaccctgtgcaggagtcagtctcagtcaggacacagcatggacatgagggtccccgctcagctcctgggactcctgctactctggctccgaggtgccagatgtgacatccagatgacccagtcgccatcctccctgtctgcatctgtcggagacagagtcactatttcctgccgggcaagtcagagcatttacacctatttaaattggtatcagcagacaccagggaaagcccctaaggtcctgatctattccgcatcaaatctgcaaagtggggtcccatcgaggttcagtggcagtggatctgggacagatttcactctcaccatcagcagtctgcaacctgaagattttgcaacttactactgtcagcagagtttcggaacgcctcggacgttcggccaagggaccaaggtgacattcaaacgaactgtggctgcaccatctgtcttcatcttcccgccatctgatgagcagttgaaatctggaactgcctctgttgtgtgcctgctgaataacttctatcccagagaggccaaagtacagtggaaggtggataacgccctccaatcgggtaactcccaggagagtgtcacagagcaggacagcaaggacagcacctacagcctcagcagcaccctgacgctgagcaaagcagactacgagaa

SEQ ID NO: 545 - DNA, 755 bp, Artificial Sequence
  Synthetic construct
ggggctcagcctgccccatgccctgctgattgatttgcatgttccagagcacagcctcctgccctgaagacttttttatgggctggtcgcaccctgtgcaggagtcagtctcagtcaggacacagcatggacatgagggtccccgctcagctcctgggactcctgctactctggctccgaggtgccagatgtgacatccagatgacccagtcgccatcctccctgtctgcatctgtcggagacagagtcactatttcctgccgggcaagtcagagcatttacacctatttaaattggtatcagcagacaccagggaaagcccctaaggtcctgatctattccgcatcaaatctgcaaagtggggtcccatcgaggttcagtggcagtggatctgggacagatttcactctcaccatcagcagtctgcaacctgaagattttgcaacttactactgtcagcagagtttcggaacgcctcggacgttcggccaagggaccaaggtgacattcaaacgaactgtggctgcaccatctgtcttcatcttcccgccatctgatgagcagttgaaatctggaactgcctctgttgtgtgcctgctgaataacttctatcccagagaggccaaagtacagtggaaggtggataacgccctccaatcgggtaactcccaggagagtgtcacagagcaggacagcaaggacagcacctacagcctcagcagcaccctgacgctgagcaaagcagactacgagaa

SEQ ID NO: 546 - DNA, 676 bp, Artificial Sequence
  Synthetic construct
gggggactgatcaggactcctcagttcaccttctcacaatgaggctccctgctcagctcctggggctgctaatgctctgggtctctggatccagtggggatattgtgatgactcagtctccactctccctgtccgtcacccctggagagccggcctccatctcctgcaggtctagtcagagcctcatgcaaagtaatggatacaactatctggactggtacctgcagaagccagggcagtctccacaactcctgatctatttgggttctaatcgggcctccggggtccctgacaggttcagtggcagtggatcaggcacagatttcacactgaaaatcagtggagtggaggctgaggatgttggggtttattattgcatgcaacctctacaaaccccgtacacctttggccaggggaccaagctggagatcaaacgaactgtggctgcaccatctgtcttcatcttcccgccatctgatgagcagttgaaatctggaactgcctctgttgtgtgcctgctgaataacttctatcccagagaggccaaagtacagtggaaggtggataacgccctccaatcgggtaactcccaggagagtgtcacagagcaggacagcaaggacagcacctacagcctcagcagcaccctgacgctgagcaaagcagactacgagaa

SEQ ID NO: 547 - DNA, 686 bp, Artificial Sequence
  Synthetic construct
gttcttatctgggggactgatcaggacttctcagttcatcttctcaccatgaggctccctgctcagctcctggggctgctaatgctctggatccctggatccagagcggatgttgtgatgacccagactccactctctctgtccgtcacccctggacagtcggcctccatctcctgcaagtccagtcagagcctcgtgcatagtgatggaaagaccgatttgtattggtacatccagaagccaggccagtctccacaactcctgatgtacgaagtttccagccggttccctggagtgccagacagattcagtggcagcgggtcagggacagatttcacactgaaaatcagccgggtggagaccgaggatgtaggcgtttattactgcatgcaaagtgtacagattcctctcactttcggcggagggaccagggtggagatcaaacgaactgtggctgcaccatctgtcttcatcttcccgccatctgatgagcagttgaaatctggaactgcctctgttgtgtgcctgctgaataacttctatcccagagaggccaaagtacagtggaaggtggataacgccctccaatcgggtaactcccaggagagtgtcacagagcaggacagcaaggacagcacctacagcctcagcagcaccctgacgctgagcaaagcagactacgagaa

SEQ ID NO: 548 - DNA, 772 bp, Artificial Sequence
  Synthetic construct
gggagattgtctctgcagctgcaagcccagcacccgccccagctgctttgcatgtccctcccagccgccctgcagtccagagcccatatcaatgcctgggtcagagctctggagaagagctgctcagttaggacccagagggaaccatggaaaccccagcgcagcttctcttcctcctgctactctggctcccagataccaccggtgaaaatgtgttgacgcaggctccaggcaccctgtctttgtctccaggagacagagccacactctcctgcagggccagtcagagtgttggcagcgactacttagcctggtaccagcagaaacgtggccaggctcccatactcctcatctatgctgcatccagcagggccactggcatcccagacaggttcagtggcagtgggtctgggacagacttcactctcaccatcagcagactggagcctgaagattctgcagtgtattactgtcaacagtatggtaactcaccgtggacgttcggcccaggggccaaggtggaggtcaaacgaactgtggctgcaccatctgtcttcatcttcccgccatctgatgagcagttgaaatctggaactgcctctgttgtgtgcctgctgaataacttctatcccagagaggccaaagtacagtggaaggtggataacgccctccaatcgggtaactcccaggagagtgtcacagagcaggacagcaaggacagcacctacagcctcagcagcaccctgacgctgagcaaagcagactacgagaa

SEQ ID NO: 549 - DNA, 821 bp, Artificial Sequence
  Synthetic construct
ggggctggcctgatcacctgggcatgggctgctgagagcagaaaggggaggcagattgtctctgcagctgcaagcccagcacccgccccagctgctttgcatgtccctcccagccgccctgcagtccagagcccatatcaatgcctgggtcagagctctggagaagagctgctcagttaggacccagagggaaccatggaaaccccagcgcagcttctcttcctcctgctactctggctcccagataccaccggtgaaaatgtgttgacgcaggctccaggcaccctgtctttgtctccaggagacagagccacactctcctgcagggccagtcagagtgttggcagcgactacttagcctggtaccagcagaaacgtggccaggctcccatactcctcatctatgctgcatccagcagggccactggcatcccagacaggttcagtggcagtgggtctgggacagacttcactctcaccatcagcagactggagcctgaagattctgcagtgtattactgtcaacagtatggtaactcaccgtggacgttcggcccaggggccaaggtggaggtcaaacgaactgtggctgcaccatctgtcttcatcttcccgccatctgatgagcagttgaaatctggaactgcctctgttgtgtgcctgctgaataacttctatcccagagaggccaaagtacagtggaaggtggataacgccctccaatcgggtaactcccaggagagtgtcacagagcaggacagcaaggacagcacctacagcctcagcagcaccctgacgctgagcaaagcagactacgagaa

SEQ ID NO: 550 - DNA, 750 bp, Artificial Sequence
  Synthetic construct
aagcccagcacccgccccagctgctttgcatgtccctcccagccgccctgcagtccagagcccatatcaatgcctgggtcagagctctggagaagagctgctcagttaggacccagagggaaccatggaaaccccagcgcagcttctcttcctcctgctactctggctcccagataccaccggtgaaaatgtgttgacgcaggctccaggcaccctgtctttgtctccaggagacagagccacactctcctgcagggccagtcagagtgttggcagcgactacttagcctggtaccagcagaaacgtggccaggctcccatactcctcatctatgctgcatccagcagggccactggcatcccagacaggttcagtggcagtgggtctgggacagacttcactctcaccatcagcagactggagcctgaagattctgcagtgtattactgtcaacagtatggtaactcaccgtggacgttcggcccaggggccaaggtggaggtcaaacgaactgtggctgcaccatctgtcttcatcttcccgccatctgatgagcagttgaaatctggaactgcctctgttgtgtgcctgctgaataacttctatcccagagaggccaaagtacagtggaaggtggataacgccctccaatcgggtaactcccaggagagtgtcacagagcaggacagcaaggacagcacctacagcctcagcagcaccctgacgctgagcaaagcagactacgagaa

SEQ ID NO: 551 - DNA, 702 bp, Artificial Sequence
  Synthetic construct
tgggggaggctctgcttcagctgtgggcacaagaggcagcactcaggacaatctccagcatggcctggtctcctctcctcctcactctcctcgctcactgcacagggtcctgggcccagtctgtcctgacgcagccgccctcagtgtctggggccccagggcagagggtcaccatctcctgcactgggggcagttccaacatcggggcaggttatggtgtacactggtaccggcaggttccaggaacaggccccaaactcctcatctatggtgataccaatcgtccttcaggggtccctgaccgattctctggctccaagtctggctcctcagcctccctggccatcactgggctccaggctgaggatgaggctgattattactgccagtcctatgacatcaggctgactggttccgatgtggttttcggcggagggaccaaactgaccgtcctaagtcagcccaaggctgccccctcggtcactctgttcccgccctcctctgaggagcttcaagccaacaaggccacactggtgtgtctcataagtgacttctacccgggagccgtgacagtggcctggaaggcagatagcagccccgtcaaggcgggagtggagaccaccacaccctccaaacaaagcaacaacaagtacgcggccagcagctatctgagcctgacgcctgagcagtggaagtcccaca

SEQ ID NO: 552 - DNA, 682 bp, Artificial Sequence
  Synthetic construct
ggggacaggctgatcacaccctgtgcaggagtcagacccagtcaggacacagcatggacatgagggtccccgctcagctcctggggctcctgctgctctggttcccaggttccagatgcgacatccagatgacccagtctccatcttccgtgtcggcatctgtaggcgacagagtcaccatcacttgtcgggcgagtcaggatattaacacttgggtagcctggtatcagcaaaaaccggggacagcccctaaactcctcatctttggtgcaaccagtttgcaaagtggggtcccatcaaggttcagcggcagtggatctgggagagatttcactctcaccatcagcagcctgcagcctgaagattttgcaacttattactgtcagcaggctcacagtctcccccgaacttttggccaggggaccaagctggagatcaaacgaactgtggctgcaccatctgtcttcatcttcccgccatctgatgagcagttgaaatctggaactgcctctgttgtgtgcctgctgaataacttctatcccagagaggccaaagtacagtggaaggtggataacgccctccaatcgggtaactcccaggagagtgtcacagagcaggacagcaaggacagcacctacagcctcagcagcaccctgacgctgagcaaagcagactacgagaa

SEQ ID NO: 553 - DNA, 736 bp, Artificial Sequence
  Synthetic construct
gggcagctgctttgcatgtccctcccagccgccctgcagtccagagcccatatcaatgcctgggtcagagctctggagaagagctgctcagttaggacccagagggaaccatggaaaccccagcgcagcttctcttcctcctgctactctggctcccagaaaccagcggagaaattgtgttgacgcagtctccagacaccctgtctgtgtctccaggggaaagagccaccctctcttgcagggccagtcagagtcttagtccctactccttagcgtggtatcagcagaaacctggccaggctcccaggctcatcatctatggtgcatccagcagggccactggcatcccagacaggttcagtggcagtgggtctgggacagacttcactctcaccatcagtacactggaggctgaggattttgcagtgtattactgtcagcagtacagtagtccacctcagacgttcggccaagggaccaaggtggaaatcaaacgaactgtggctgcaccatctgtcttcatcttcccgccatctgatgagcagttgaaatctggaactgcctctgttgtgtgcctgctgaataacttctatcccagagaggccaaagtacagtggaaggtggataacgccctccaatcgggtaactcccaggagagtgtcacagagcaggacagcaaggacagcacctacagcctcagcagcaccctgacgctgagcaaagcagactacgagaa

SEQ ID NO: 554 - DNA, 704 bp, Artificial Sequence
  Synthetic construct
ggggctcctgccctgaagccttattaataggctggacacacttcatgcaggaatcagtcccactcaggacacagcatggacatgagggtccccgctcagctcctggggctcctgctgctctggttcccaggtgccaggtgtgacatccagatgacccagtctccttctgccatgtctgcatctgtcggagacagaatcaccatcacttgtcgggcgagtcaggccattagtaattctttagcctggtttcagcagaaaccagggaaagtccctaagcgcctgatctatggtgcatccagtttgcaaagtggggtcccatcaaggttcagcggcagtggatctgggacagaattcactctcacaatcaccagcctgcagcctgaagattttgcaacttatttctgtctacagcataatagttacccgtacagttttggccaggggaccaagctggagatcaaacgaactgtggctgcaccatctgtcttcatcttcccgccatctgatgagcagttgaaatctggaactgcctctgttgtgtgcctgctgaataacttctatcccagagaggccaaagtacagtggaaggtggataacgccctccaatcgggtaactcccaggagagtgtcacagagcaggacagcaaggacagcacctacagcctcagcagcaccctgacgctgagcaaagcagactacgagaa

SEQ ID NO: 555 - DNA, 683 bp, Artificial Sequence
  Synthetic construct
ggggaataggctggacacacttcatgcaggaatcagtcccactcaggacacagcatggacatgagggtccccgctcagctcctggggctcctgctgctctggttcccaggtgccaggtgtgacatccagatgacccagtctccttctgccatgtctgcatctgtcggagacagaatcaccatcacttgtcgggcgagtcaggccattagtaattctttagcctggtttcagcagaaaccagggaaagtccctaagcgcctgatctatggtgcatccagtttgcaaagtggggtcccatcaaggttcagcggcagtggatctgggacagaattcactctcacaatcaccagcctgcagcctgaagattttgcaacttatttctgtctacagcataatagttacccgtacagttttggccaggggaccaagctggagatcaaacgaactgtggctgcaccatctgtcttcatcttcccgccatctgatgagcagttgaaatctggaactgcctctgttgtgtgcctgctgaataacttctatcccagagaggccaaagtacagtggaaggtggataacgccctccaatcgggtaactcccaggagagtgtcacagagcaggacagcaaggacagcacctacagcctcagcagcaccctgacgctgagcaaagcagactacgagaa

SEQ ID NO: 556 - DNA, 674 bp, Artificial Sequence
  Synthetic construct
ttcctttcttatatggggaggaatcagtcccactcaggacacagcatggacatgagggtccccgctcagctcctggggctcctgctgctctggttcccaggtgccaggtgtgacatccagatgacccagtctccttctgccatgtctgcatctgtcggagacagaatcaccatcacttgtcgggcgagtcaggccattagtaattctttagcctggtttcagcagaaaccagggaaagtccctaagcgcctgatctatggtgcatccagtttgcaaagtggggtcccatcaaggttcagcggcagtggatctgggacagaattcactctcacaatcaccagcctgcagcctgaagattttgcaacttatttctgtctacagcataatagttacccgtacagttttggccaggggaccaagctggagatcaaacgaactgtggctgcaccatctgtcttcatcttcccgccatctgatgagcagttgaaatctggaactgcctctgttgtgtgcctgctgaataacttctatcccagagaggccaaagtacagtggaaggtggataacgccctccaatcgggtaactcccaggagagtgtcacagagcaggacagcaaggacagcacctacagcctcagcagcaccctgacgctgagcaaagcagactacgagaa

SEQ ID NO: 557 - DNA, 680 bp, Artificial Sequence
  Synthetic construct
ggggaggctggacacacttcatgcaggaatcagtcccactcaggacacagcatggacatgagggtccccgctcagctcctggggctcctgctgctctggttcccaggtgccaggtgtgacatccagatgacccagtctccttctgccatgtctgcatctgtcggagacagaatcaccatcacttgtcgggcgagtcaggccattagtaattctttagcctggtttcagcagaaaccagggaaagtccctaagcgcctgatctatggtgcatccagtttgcaaagtggggtcccatcaaggttcagcggcagtggatctgggacagaattcactctcacaatcaccagcctgcagcctgaagattttgcaacttatttctgtctacagcataatagttacccgtacagttttggccaggggaccaagctggagatcaaacgaactgtggctgcaccatctgtcttcatcttcccgccatctgatgagcagttgaaatctggaactgcctctgttgtgtgcctgctgaataacttctatcccagagaggccaaagtacagtggaaggtggataacgccctccaatcgggtaactcccaggagagtgtcacagagcaggacagcaaggacagcacctacagcctcagcagcaccctgacgctgagcaaagcagactacgagaa

SEQ ID NO: 558 - DNA, 676 bp, Artificial Sequence
  Synthetic construct
gggggactgatcaggactcctcagttcaccttctcacaatgaggctccctgctcagctcctggggctgctaatgctctgggtctctggatccagtggagatattgtgatgactcagtctccagtgtccctgcccgtcacccctggagagccggcctccatctcctgcaggtctagtcaaagcctcctttatagtaatggccacaacttcttggattggtatgtgcagaagcccggccagtctccacaactcctgatctatttggcttctactcgggcctccggggtccctgacaggttcagtggcagtggatcaggcacagagtttacactgaaaatcagcagagtggaggctgaagacgttggggtttattactgcatgcaacctttacaaaccccctacacttttggccaggggaccaagctggagatcaagcgaactgtggctgcaccatctgtcttcatcttcccgccatctgatgagcagttgaaatctggaactgcctctgttgtgtgcctgctgaataacttctatcccagagaggccaaagtacagtggaaggtggataacgccctccaatcgggtaactcccaggagagtgtcacagagcaggacagcaaggacagcacctacagcctcagcagcaccctgacgctgagcaaagcagactacgagaa

SEQ ID NO: 559 - DNA, 673 bp, Artificial Sequence
  Synthetic construct
atttttcgtatctggggaggaatcagtcccactcaggacacagcatggacatgagggtccccgctcagctcctggggctcctgctgctctggttcccaggtgccaggtgtgacatccagatgacccagtctccttctgccatgtctgcatctgtcggagacagaatcaccatcacttgtcgggcgagtcaggccattagtaattctttagcctggtttcagcagaaaccagggaaagtccctaagcgcctgatctatggtgcatccagtttgcaaagtggggtcccatcaaggttcagcggcagtggatctgggacagaattcactctcacaatcaccagcctgcagcctgaagattttgcaacttatttctgtctacagcataatagttacccgtacagttttggccaggggaccaagctggagatcaaacgaactgtggctgcaccatctgtcttcatcttcccgccatctgatgagcagttgaaatctggaactgcctctgttgtgtgcctgctgaataacttctatcccagagaggccaaagtacagtggaaggtggataacgccctccaatcgggtaactcccaggagagtgtcacagagcaggacagcaaggacagcacctacagcctcagcagcaccctgacgctgagcaaagcagactacgagaa

SEQ ID NO: 560 - DNA, 657 bp, Artificial Sequence
  Synthetic construct
gggggaatcagtcccactcaggacacagcatggacatgagggtccccgctcagctcctggggctcctgctgctctggttcccaggtgccaggtgtgacatccagatgacccagtctccttctgccatgtctgcatctgtcggagacagaatcaccatcacttgtcgggcgagtcaggccattagtaattctttagcctggtttcagcagaaaccagggaaagtccctaagcgcctgatctatggtgcatccagtttgcaaagtggggtcccatcaaggttcagcggcagtggatctgggacagaattcactctcacaatcaccagcctgcagcctgaagattttgcaacttatttctgtctacagcataatagttacccgtacagttttggccaggggaccaagctggagatcaaacgaactgtggctgcaccatctgtcttcatcttcccgccatctgatgagcagttgaaatctggaactgcctctgttgtgtgcctgctgaataacttctatcccagagaggccaaagtacagtggaaggtggataacgccctccaatcgggtaactcccaggagagtgtcacagagcaggacagcaaggacagcacctacagcctcagcagcaccctgacgctgagcaaagcagactacgaga

SEQ ID NO: 561 - DNA, 671 bp, Artificial Sequence
  Synthetic construct
ttttcttctctggggaggaatcagtcccactcaggacacagcatggacatgagggtccccgctcagctcctggggctcctgctgctctggttcccaggtgccaggtgtgacatccagatgacccagtctccttctgccatgtctgcatctgtcggagacagaatcaccatcacttgtcgggcgagtcaggccattagtaattctttagcctggtttcagcagaaaccagggaaagtccctaagcgcctgatctatggtgcatccagtttgcaaagtggggtcccatcaaggttcagcggcagtggatctgggacagaattcactctcacaatcaccagcctgcagcctgaagattttgcaacttatttctgtctacagcataatagttacccgtacagttttggccaggggaccaagctggagatcaaacgaactgtggctgcaccatctgtcttcatcttcccgccatctgatgagcagttgaaatctggaactgcctctgttgtgtgcctgctgaataacttctatcccagagaggccaaagtacagtggaaggtggataacgccctccaatcgggtaactcccaggagagtgtcacagagcaggacagcaaggacagcacctacagcctcagcagcaccctgacgctgagcaaagcagactacgagaa

SEQ ID NO: 562 - DNA, 707 bp, Artificial Sequence
  Synthetic construct
ggggagcctcctgccctgaagccttattaataggctggacacacttcatgcaggaatcagtcccactcaggacacagcatggacatgagggtccccgctcagctcctggggctcctgctgctctggttcccaggtgccaggtgtgacatccagatgacccagtctccttctgccatgtctgcatctgtcggagacagaatcaccatcacttgtcgggcgagtcaggccattagtaattctttagcctggtttcagcagaaaccagggaaagtccctaagcgcctgatctatggtgcatccagtttgcaaagtggggtcccatcaaggttcagcggcagtggatctgggacagaattcactctcacaatcaccagcctgcagcctgaagattttgcaacttatttctgtctacagcataatagttacccgtacagttttggccaggggaccaagctggagatcaaacgaactgtggctgcaccatctgtcttcatcttcccgccatctgatgagcagttgaaatctggaactgcctctgttgtgtgcctgctgaataacttctatcccagagaggccaaagtacagtggaaggtggataacgccctccaatcgggtaactcccaggagagtgtcacagagcaggacagcaaggacagcacctacagcctcagcagcaccctgacgctgagcaaagcagactacgagaa

SEQ ID NO: 563 - DNA, 671 bp, Artificial Sequence
  Synthetic construct
ggggacacttcatgcaggaatcagtcccactcaggacacagcatggacatgagggtccccgctcagctcctggggctcctgctgctctggttcccaggtgccaggtgtgacatccagatgacccagtctccttctgccatgtctgcatctgtcggagacagaatcaccatcacttgtcgggcgagtcaggccattagtaattctttagcctggtttcagcagaaaccagggaaagtccctaagcgcctgatctatggtgcatccagtttgcaaagtggggtcccatcaaggttcagcggcagtggatctgggacagaattcactctcacaatcaccagcctgcagcctgaagattttgcaacttatttctgtctacagcataatagttacccgtacagttttggccaggggaccaagctggagatcaaacgaactgtggctgcaccatctgtcttcatcttcccgccatctgatgagcagttgaaatctggaactgcctctgttgtgtgcctgctgaataacttctatcccagagaggccaaagtacagtggaaggtggataacgccctccaatcgggtaactcccaggagagtgtcacagagcaggacagcaaggacagcacctacagcctcagcagcaccctgacgctgagcaaagcagactacgagaa

SEQ ID NO: 564 - DNA, 670 bp, Artificial Sequence
  Synthetic construct
tttcgtatctggggaggaatcagtcccactcaggacacagcatggacatgagggtccccgctcagctcctggggctcctgctgctctggttcccaggtgccaggtgtgacatccagatgacccagtctccttctgccatgtctgcatctgtcggagacagaatcaccatcacttgtcgggcgagtcaggccattagtaattctttagcctggtttcagcagaaaccagggaaagtccctaagcgcctgatctatggtgcatccagtttgcaaagtggggtcccatcaaggttcagcggcagtggatctgggacagaattcactctcacaatcaccagcctgcagcctgaagattttgcaacttatttctgtctacagcataatagttacccgtacagttttggccaggggaccaagctggagatcaaacgaactgtggctgcaccatctgtcttcatcttcccgccatctgatgagcagttgaaatctggaactgcctctgttgtgtgcctgctgaataacttctatcccagagaggccaaagtacagtggaaggtggataacgccctccaatcgggtaactcccaggagagtgtcacagagcaggacagcaaggacagcacctacagcctcagcagcaccctgacgctgagcaaagcagactacgagaa

SEQ ID NO: 565 - DNA, 665 bp, Artificial Sequence
  Synthetic construct
tatctggggaggaatcagtcccactcaggacacagcatggacatgagggtccccgctcagctcctggggctcctgctgctctggttcccaggtgccaggtgtgacatccagatgacccagtctccttctgccatgtctgcatctgtcggagacagaatcaccatcacttgtcgggcgagtcaggccattagtaattctttagcctggtttcagcagaaaccagggaaagtccctaagcgcctgatctatggtgcatccagtttgcaaagtggggtcccatcaaggttcagcggcagtggatctgggacagaattcactctcacaatcaccagcctgcagcctgaagattttgcaacttatttctgtctacagcataatagttacccgtacagttttggccaggggaccaagctggagatcaaacgaactgtggctgcaccatctgtcttcatcttcccgccatctgatgagcagttgaaatctggaactgcctctgttgtgtgcctgctgaataacttctatcccagagaggccaaagtacagtggaaggtggataacgccctccaatcgggtaactcccaggagagtgtcacagagcaggacagcaaggacagcacctacagcctcagcagcaccctgacgctgagcaaagcagactacgagaa

SEQ ID NO: 566 - DNA, 680 bp, Artificial Sequence; identical to SEQ ID NO: 557
  Synthetic construct

SEQ ID NO: 567 - DNA, 680 bp, Artificial Sequence
  Synthetic construct
ggggaggctgatcacaccctgtgcaggagtcagacccagtcaggacaaagcatggacatgagggtccccgctcagctcctggggctcctggtactctggttcccaggttccagatgcgacatccacatgacccagtctccttcttccgtgtctggttctgtaggggacagagtcaccatcacttgtcgggcgagtgaggctattgacaagtggttagcctggtatcagcagaaaccagggaaagcccccaaactcctcatctatggtgcctctattttgcaaaaaggggtcccatcgaggttcagcggcagtggatctgggacagaattcagtctcaccataaataacctgcagcctgacgactttgcaacttatttctgtcaacaggcttacagtaaccctcgaacctttggccaggggtccaaggtggaaatcaaacgaactgtggctgcaccatctgtcttcatcttcccgccatctgatgagcagttgaaatctggaactgcctctgttgtgtgcctgctgaataacttctatcccagagaggccaaagtacagtggaaggtggataacgccctccaatcgggtaactcccaggagagtgtcacagagcaggacagcaaggacagcacctacagcctcagcagcaccctgacgctgagcaaagcagactacgagaa

SEQ ID NO: 568 - DNA, 756 bp, Artificial Sequence
  Synthetic construct
atctggggagcctgccccatgccctgctgattgatttgcatgttccagagcacagcctcctgccctgaagacttttttatgggctggtcgcaccctgtgcaggagtcagtctcagtcaggacacagcatggacatgagggtccccgctcagctcctgggactcctgctactctggctccgaggtgccagatgtgacatccagatgacccagtctccatcctccctgtctgcatctgtcggagacagagtcaccattacctgccgggcaagtcagagcatttacacctatttaaattggtatcagcagacaccagggaaagcccctaaggtcctgatctataccgcatcaaatctgcaaagtggggtcccatcgaggttcagtggcagtggatctgggacagatttcactctcaccatcagcagtctgcaacctgaagattttgcaacttactactgtcaacagagtttcggaacccctcggacgttcggccaagggaccaaggtggaaatcaaacgaactgtggctgcaccatctgtcttcatcttcccgccatctgatgagcagttgaaatctggaactgcctctgttgtgtgcctgctgaataacttctatcccagagaggccaaagtacagtggaaggtggataacgccctccaatcgggtaactcccaggagagtgtcacagagcaggacagcaaggacagcacctacagcctcagcagcaccctgacgctgagcaaagcagactacgagaa

SEQ ID NO: 569 - DNA, 665 bp, Artificial Sequence
  Synthetic construct
tgggggtgcaggagtcagtctcagtcaggacacagcatggacatgagggtccccgctcagctcctgggactcctgctactctggctccgaggtgccagatgtgacatccagatgacccagtctccatcctccctgtctgcatctgtcggagacagagtcaccattacctgccgggcaagtcagagcatttacacctatttaaattggtatcagcagacaccagggaaagcccctaaggtcctgatctataccgcatcaaatctgcaaagtggggtcccatcgaggttcagtggcagtggatctgggacagatttcactctcaccatcagcagtctgcaacctgaagattttgcaacttactactgtcaacagagtttcggaacccctcggacgttcggccaagggaccaaggtggaaatcaaacgaactgtggctgcaccatctgtcttcatcttcccgccatctgatgagcagttgaaatctggaactgcctctgttgtgtgcctgctgaataacttctatcccagagaggccaaagtacagtggaaggtggataacgccctccaatcgggtaactcccaggagagtgtcacagagcaggacagcaaggacagcacctacagcctcagcagcaccctgacgctgagcaaagcagactacgagaa

SEQ ID NO: 570 - DNA, 671 bp, Artificial Sequence
  Synthetic construct
gggacacacctgtgcaggagtcagtcccagtcaggacacagcatggacatgagggtccccgctcagctcctggggctcctgctgctctggctcccaggtgccagatgtgacatccagttgacccagtctccatccttcctgtctgcatctgtcggagacagagtcagcatcacttgccgggccagtcaggacattcggagtcatttagcctggtatcagcaaaaaccagggagagcccctaacctcctgatctatgctgcatcctctttgcaacctggggtcccatctaggttcagcggcagtggttctgggacatatttcactctcacaatcagcagcctgcagcctgcagattctgcaacttattactgtcaacaacttaatacttatcctcggaccttcggccaagggacacgactggagattaaacgaactgtggctgcaccatctgtcttcatcttcccgccatctgatgagcagttgaaatctggaactgcctctgttgtgtgcctgctgaataacttctatcccagagaggccaaagtacagtggaaggtggataacgccctccaatcgggtaactcccaggagagtgtcacagagcaggacagcaaggacagcacctacagcctcagcagcaccctgacgctgagcaaagcagactacgagaa

SEQ ID NO: 571 - DNA, 687 bp, Artificial Sequence
  Synthetic construct
gggggagctacaacaggcaggcaggggcagcaagatggtgttgcagacccaggtcttcatttctctgttgctctggatctctgtgactacaggtgcctccggggacatcgtgatgacccagtctccagactccctggctgtgtctctgggcgagagggccaccatcaactgcaagtccagccggactattttatacagctccaacaataagaactacttagcttggtaccgccagaaaccaggacagcctcctactttgctcatttactgggcatctacccgggcatccggggtccctgaccgattcagtggcagcgggtctgggacagaattcactctcaccatcagcagcctgcagcctgatgattttgcaacttattactgccaacagtataatagttattctccgtggacgttcggccaagggaccaaggtggaaatcaaacgaactgtggctgcaccatctgtcttcatcttcccgccatctgatgagcagttgaaatctggaactgcctctgttgtgtgcctgctgaataacttctatcccagagaggccaaagtacagtggaaggtggataacgccctccaatcgggtaactcccaggagagtgtcacagagcaggacagcaaggacagcacctacagcctcagcagcaccctgacgctgagcaaagcagactacgagaa

SEQ ID NO: 572 - DNA, 676 bp, Artificial Sequence
  Synthetic construct
gggggactgatcaggacttctcagttcatcttctcaccatgaggctccctgctcagctcctggggctgctaatgctctggatccctggatctagtgcggatattgtgatgacccagagtccactctctctgtccgtcacccctggacagccggcctccatctcctgcaagtctagtcagagcctcctgcatagtgatgggaagacctatttgtattggtatctgcacaaggcaggccagtctccacagctcctaatctctgaggtctccagccggttctctggagtgccagataggttcagtggcagcgggtcagggacagatttcacactgaaaatcagccgagtggaggctgaggatgttggcgtttattactgcatgcaaggtatacagcttcccctcactttcggcggagggaccaaggtggagatcaaacgaactgtggctgcaccatctgtcttcatcttcccgccatctgatgagcagttgaaatctggaactgcctctgttgtgtgcctgctgaataacttctatcccagagaggccaaagtacagtggaaggtggataacgccctccaatcgggtaactcccaggagagtgtcacagagcaggacagcaaggacagcacctacagcctcagcagcaccctgacgctgagcaaagcagactacgagaa

SEQ ID NO: 573 - DNA, 692 bp, Artificial Sequence
  Synthetic construct
gggagctgtaactgtgccttgactgatcaggactcctcagttcaccttctcacaatgaggctccctgctcagctcctggggctgctaatgctctgggtctctggatccagtggggatattgtgatgactcagtctccactctccctgtccgtcacccctggagagccggcctccatctcctgcaggtctagtcagagcctcctgcaaagtaatggatacaactatctggactggtacctgcagaagccagggcagtctccacagctcctgatctatttgggttctaatcgggcctccggggtccctgacaggttcagtggcagtggatcaggcacagattttacactgaaaatcagtggagtggaggctgaggatgttggggtttattattgcatgcaacctctacaaaccccgtacacttttggccaggggaccaagctggagatcaaacgaactgtggctgcaccatctgtcttcatcttcccgccatctgatgagcagttgaaatctggaactgcctctgttgtgtgcctgctgaataacttctatcccagagaggccaaagtacagtggaaggtggataacgccctccaatcgggtaactcccaggagagtgtcacagagcaggacagcaaggacagcacctacagcctcagcagcaccctgacgctgagcaaagcagactacgagaa

SEQ ID NO: 574 - DNA, 680 bp, Artificial Sequence
  Synthetic construct
tagatggggactgatcaggactcctcagttcaccttctcacaatgaggctccctgctcagctcctggggctgctaatgctctgggtctctggatccagtggggatattgtgatgactcagtctccactctccctgtccgtcacccctggagagccggcctccatctcctgcaggtctagtcagagcctcctgcaaagtaatggatacaactatctggactggtacctgcagaagccagggcagtctccacagctcctgatctatttgggttctaatcgggcctccggggtccctgacaggttcagtggcagtggatcaggcacagattttacactgaaaatcagtggagtggaggctgaggatgttggggtttattattgcatgcaacctctacaaaccccgtacacttttggccaggggaccaagctggagatcaaacgaactgtggctgcaccatctgtcttcatcttcccgccatctgatgagcagttgaaatctggaactgcctctgttgtgtgcctgctgaataacttctatcccagagaggccaaagtacagtggaaggtggataacgccctccaatcgggtaactcccaggagagtgtcacagagcaggacagcaaggacagcacctacagcctcagcagcaccctgacgctgagcaaagcagactacgagaa

SEQ ID NO: 575 - DNA, 745 bp, Artificial Sequence
  Synthetic construct
tctgggagctgtaactgtgccttgactgatcaggactcctcagttcaccttctcacaatgaggctccctgctcagctcctggggctgctaatgctctgggtctctggatccagtggggatattgtgatgactcagtctccactctccctgtccgtcacccctggagagccggcctccatctcctgcaggtctagtcagagcctcctgcaaagtaatggatacaactatctggactggtacctgcagaagccagggcagtctccacagctcctgatctatttgggttctaatcgggcctccggggtccctgacaggttcagtggcagtggatcaggcacagattttacactgaaaatcagtggagtggaggctgaggatgttggggtttattattgcatgcaacctctacaaaccccgtacacttttggccaggggaccaagctggagatcaaacgaactgtggctgcaccatctgtcttcatcttcccgccatctgatgagcagttgaaatctggaactgcctctgttgtgtgcctgctgaataacttctatcccagagaggccaaagtacagtggaaggtggataacgccctccaatcgggtaactcccaggagagtgtcacagagcaggacagcaaggacagcacctacagcctcagcagcaccctgacgctgagcaaagcagactacgagaaacacaaagtctacgcctgcgaagtcacccatcagggcctgagctcgcccg

SEQ ID NO: 576 - DNA, 676 bp, Artificial Sequence
  Synthetic construct
gggggactgatcaggactcctcagttcaccttctcacaatgaggctccctgctcagctcctggggctgctaatgctctgggtctctggatccagtggggatattgtgatgactcagtctccactctccctgtccgtcacccctggagagccggcctccatctcctgcaggtctagtcagagcctcctgcaaagtaatggatacaactatctggactggtacctgcagaagccagggcagtctccacagctcctgatctatttgggttctaatcgggcctccggggtccctgacaggttcagtggcagtggatcaggcacagattttacactgaaaatcagtggagtggaggctgaggatgttggggtttattattgcatgcaacctctacaaaccccgtacacttttggccaggggaccaagctggagatcaaacgaactgtggctgcaccatctgtcttcatcttcccgccatctgatgagcagttgaaatctggaactgcctctgttgtgtgcctgctgaataacttctatcccagagaggccaaagtacagtggaaggtggataacgccctccaatcgggtaactcccaggagagtgtcacagagcaggacagcaaggacagcacctacagcctcagcagcaccctgacgctgagcaaagcagactacgagaa

SEQ ID NO: 577 - DNA, 678 bp, Artificial Sequence
  Synthetic construct
gggactgactgatcaggacttctcagttcatcttctcaccatgaggctccctgctcagctcctggggctgctaatgctctggatccctggatctagtgcggatattgtgatgacccagagtccactctctctgtccgtcacccctggacagccggcctccatctcctgcaagtctagtcagagcctcctgcatagtgatgggaagacctatttgtattggtatctgcacaaggcaggccagtctccacagctcctaatctctgaggtctccagccggttctctggagtgccagataggttcagtggcagcgggtcagggacagatttcacactgaaaatcagccgagtggaggctgaggatgttggcgtttattactgcatgcaaggtatacagcttcccctcactttcggcggagggaccaaggtggagatcaaacgaactgtggctgcaccatctgtcttcatcttcccgccatctgatgagcagttgaaatctggaactgcctctgttgtgtgcctgctgaataacttctatcccagagaggccaaagtacagtggaaggtggataacgccctccaatcgggtaactcccaggagagtgtcacagagcaggacagcaaggacagcacctacagcctcagcagcaccctgacgctgagcaaagcagactacgagaa

SEQ ID NO: 578 - DNA, 668 bp, Artificial Sequence
  Synthetic construct
ggacacctgtgcaggagtcagtcccagtcaggacacagcatggacatgagggtccccgctcagctcctggggctcctgctgctctggctcccaggtgccagatgtgacatccagttgacccagtctccatccttcctgtctgcatctgtcggagacagagtcagcatcacttgccgggccagtcaggacattcggagtcatttagcctggtatcagcaaaaaccagggagagcccctaacctcctgatctatgctgcatcctctttgcaacctggggtcccatctaggttcagcggcagtggttctgggacatatttcactctcacaatcagcagcctgcagcctgcagattctgcaacttattactgtcaacaacttaatacttatcctcggaccttcggccaagggacacgactggagattaaacgaactgtggctgcaccatctgtcttcatcttcccgccatctgatgagcagttgaaatctggaactgcctctgttgtgtgcctgctgaataacttctatcccagagaggccaaagtacagtggaaggtggataacgccctccaatcgggtaactcccaggagagtgtcacagagcaggacagcaaggacagcacctacagcctcagcagcaccctgacgctgagcaaagcagactacgagaa

SEQ ID NO: 579 - DNA, 685 bp, Artificial Sequence
  Synthetic construct
gggaatgcctgggtcacagctctggagaagagctgctcagttaggacccagagggaaccatggaaaccccagcgcagcttctcttcctcctgctactctggctcccagatatcaccggagagattgtgttgacgcagtctccaggcaccctgtctttctctccaggagagagagccatcctctcctgcagggccagtcagagtgtcagcagcaactacctagcctggtaccagcacaaacctggccagtctcccagactcctcatctatggcgcatccaacagggccactggcatcccagacaggttcagtggcagtggatctgggacagacttcactctcaccatcagcagactggaggcagaagattttgcagtgtatatctgtcaacagtatggtaccttgcctccgacgttcggcctagggaccaaggtggatctcaaacgaactgtggctgcaccatctgtcttcatcttcccgccatctgatgagcagttgaaatctggaactgcctctgttgtgtgcctgctgaataacttctatcccagagaggccaaagtacagtggaaggtggataacgccctccaatcgggtaactcccaggagagtgtcacagagcaggacagcaaggacagcacctacagcctcagcagcaccctgacgctgagcaaagcagactacgagaa

SEQ ID NO: 580 - DNA, 672 bp, Artificial Sequence
  Synthetic construct
tggggagagccctggggaggaactgctcagttaggacccagagggaaccatggaagccccagctcagcttctcttcctcctgctactctggctcccagaaaccactggagaaattgtgttgacacaatctccagccaccctgtctttgtctccaggggaaagagccaccctctcctgcagggccagtcagagtattagcaggaacttagcctggtatcaacagagacctggccaggctcccaggctcctcatctatgaaacatccaagagggccgaaggcatcccagccaggttcagtggcagtggggctgggacagacttcactctcaccatcagcagcctagagcctgaagattgtgcagtttatttctgtcagcagcgtattaactggttattcactttcggccctgggaccaaagtggagatcaaacgaactgtggctgcaccatctgtcttcatcttcccgccatctgatgagcagttgaaatctggaactgcctctgttgtgtgcctgctgaataacttctatcccagagaggccaaagtacagtggaaggtggataacgccctccaatcgggtaactcccaggagagtgtcacagagcaggacagcaaggacagcacctacagcctcagcagcaccctgacgctgagcaaagcagactacgagaa

SEQ ID NO: 581 - DNA, 659 bp, Artificial Sequence
  Synthetic construct
gggaggagtcagtcccagtcaggacacagcatggacatgagggtccccgctcagctcctggggctcctgctgctctggctcccaggtgccagatgtgacatccagttgacccagtctccatccttcctgtctgcatctgtcggagacagagtcagcatcacttgccgggccagtcaggacattcggagtcatttagcctggtatcagcaaaaaccagggagagcccctaacctcctgatctatgctgcatcctctttgcaacctggggtcccatctaggttcagcggcagtggttctgggacatatttcactctcacaatcagcagcctgcagcctgcagattctgcgacttattactgtcaacaactcaatacttatcctcggaccttcggccaagggacacgactggagattaaacgaactgtggctgcaccatctgtcttcatcttcccgccatctgatgagcagttgaaatctggaactgcctctgttgtgtgcctgctgaataacttctatcccagagaggccaaagtacagtggaaggtggataacgccctccaatcgggtaactcccaggagagtgtcacagagcaggacagcaaggacagcacctacagcctcagcagcaccctgacgctgagcaaagcagactacgagaa

SEQ ID NO: 582 - DNA, 686 bp, Artificial Sequence
  Synthetic construct
ggggaatgcctgggtcacagctctggagaagagctgctcagttaggacccagagggaaccatggaaaccccagcgcagcttctcttcctcctgctactctggctcccagatatcaccggagagattgtgttgacgcagtctccaggcaccctgtctttctctccaggagagagagccatcctctcctgcagggccagtcagagtgtcagcagcaactacctagcctggtaccagcacaaacctggccagtctcccagactcctcatctatggcgcatccaacagggccactggcatcccagacaggttcagtggcagtggatctgggacagacttcactctcaccatcagcagactggaggcagaagattttgcagtgtatatctgtcaacagtatggtaccttgcctccgacgttcggcctagggaccaaggtggatctcaaacgaactgtggctgcaccatctgtcttcatcttcccgccatctgatgagcagttgaaatctggaactgcctctgttgtgtgcctgctgaataacttctatcccagagaggccaaagtacagtggaaggtggataacgccctccaatcgggtaactcccaggagagtgtcacagagcaggacagcaaggacagcacctacagcctcagcagcaccctgacgctgagcaaagcagactacgagaa

SEQ ID NO: 583 - DNA, 756 bp, Artificial Sequence
  Synthetic construct
gggggcaagcccagcacccgccccagctgctttgcatgtccctcccagccgccctgcagtccagagcccatatcaatgcctgggtcacagctctggagaagagctgctcagttaggacccagagggaaccatggaaaccccagcgcagcttctcttcctcctgctactctggctcccagatatcaccggagagattgtgttgacgcagtctccaggcaccctgtctttctctccaggagagagagccatcctctcctgcagggccagtcagagtgtcagcagcaactacctagcctggtaccagcacaaacctggccagtctcccagactcctcatctatggcgcatccaacagggccactggcatcccagacaggttcagtggcagtggatctgggacagacttcactctcaccatcagcagactggaggcagaagattttgcagtgtatatctgtcaacagtatggtaccttgcctccgacgttcggcctagggaccaaggtggatctcaaacgaactgtggctgcaccatctgtcttcatcttcccgccatctgatgagcagttgaaatctggaactgcctctgttgtgtgcctgctgaataacttctatcccagagaggccaaagtacagtggaaggtggataacgccctccaatcgggtaactcccaggagagtgtcacagagcaggacagcaaggacagcacctacagcctcagcagcaccctgacgctgagcaaagcagactacgagaa

SEQ ID NO: 584 - DNA, 681 bp, Artificial Sequence
  Synthetic construct
tagatgggggactgatcaggactcctcagttcaccttctcacaatgaggctccctgctcagctcctggggctgctaatgctctgggtctctggatccagtggggatattgtgatgactcagtctccactctccctgcccgtcactcctggagagccggcctccatctcctgcaggtctagtcagagcctcctctatagtaatggaaacaactatttggattggtacctgcagaagccagggcagtctccacagctcctgatctatttgggttctaatcgggcctccggggtccctgacaggttcagtggcagtggatcaggcacagattttacactgaaaatcagcaaagtggaggctgaggatgttgggatttattactgcatgcaagctctacaaaccccgtacacttttggccaggggaccaagctggagatcaaacgaactgtggctgcaccatctgtcttcatcttcccgccatctgatgagcagttgaaatctggaactgcctctgttgtgtgcctgctgaataacttctatcccagagaggccaaagtacagtggaaggtggataacgccctccaatcgggtaactcccaggagagtgtcacagagcaggacagcaaggacagcacctacagcctcagcagcaccctgacgctgagcaaagcagactacgagaa

SEQ ID NO: 585 - DNA, 686 bp, Artificial Sequence; identical to SEQ ID NO: 582
  Synthetic construct

SEQ ID NO: 586 - DNA, 714 bp, Artificial Sequence
  Synthetic construct
ggtagtcctcctgtttcttatatggggaagctctgcttcagctgtgagcgcagaaggcaggactcgggacaatcttcatcatgacctgctcccctctcctcctcacccttctcattcactgcacagggtcctgggcccagtctgtgttgacgcagccgccctcagtgtctgcggccccaggacagaaggtcaccatctactgctctggaagcatcttcaatgttggggataagtatgtgtcctggtaccagcagttccccggaggagcccccaaactcctcatttatgacaatgttaagagaccctcaggcattcctgagcgattcgctggctccaagtctggcacgtcagccaccctggacatcaccggactccagactggtgacgaggccgagtatcactgcggaacatgggatagcagcctgagtgcttatgtcttcgggagtgggactaaggtcagcgtcctaggtcagcccaaggccaaccccactgtcactctgttcccgccctcctctgaggagctccaagccaacaaggccacactagtgtgtctgatcagtgacttctacccgggagctgtgacagtggcctggaaggcagatggcagccccgtcaaggcgggagtggagaccaccaaaccctccaaacagagcaacaacaagtacgcggccagcagctacctgagcctgacgcccgagcagtggaagtcccaca

SEQ ID NO: 587 - DNA, 695 bp, Artificial Sequence
  Synthetic construct
tctatggggaagctctgcttcagctgtgagcgcagaaggcaggactcgggacaatcttcatcatgacctgctcccctctcctcctcacccttctcattcactgcacagggtcctgggcccagtctgtgttgacgcagccgccctcagtgtctgcggccccaggacagaaggtcaccatctactgctctggaagcatcttcaatgttggggataagtatgtgtcctggtaccagcagttccccggaggagcccccaaagtcctcatttatgacaatgttaagagaccctcaggcattcctgagcgattcgctggctccaagtctggcacgtcagccaccctggacatcaccggactccagactggtgacgaggccgagtatcactgcggaacatgggatagcagcctgagtgcttatgtcttcgggagtgggactaaggtcagcgtcctaggtcagcccaaggccaaccccactgtcactctgttcccgccctcctctgaggagctccaagccaacaaggccacactagtgtgtctgatcagtgacttctacccgggagctgtgacagtggcctggaaggcagatggcagccccgtcaaggcgggagtggagaccaccaaaccctccaaacagagcaacaacaagtacgcggccagcagctacctgagcctgacgcccgagcagtggaagtcccac

SEQ ID NO: 588 - DNA, 676 bp, Artificial Sequence
  Synthetic construct
agggggagctgtgggctcagaagcagagttctggggtgtctccaccatggcctggacccctctctggctcactctcctcactctttgcataggttctgtggtttcttctgagctgactcaggaccctgctgtgtctgtggccttgggacagacagtccggatcacatgccaaggagacaccctcagaagcaattatgcaagctggtaccagcagaagccaggacaggccccttcacttgtcatgtatggtaaagataagcggccctcagggatcccagaccgattctcggggtccacctcaggaaatacagcttccttgaccatcgctggggctcaggcggaagatgaggctgactatttctgtctttcccgggacagcaatgccaaatatatcagggttttcggcggaggcaccaagctgaccgtcctaggtcagcccaaggctgccccctcggtcactctgttcccgccctcctctgaggagcttcaagccaacaaggccacactggtgtgtctcataagtgacttctacccgggagccgtgacagtggcctggaaggcagatagcagccccgtcaaggcgggagtggagaccaccacaccctccaaacaaagcaacaacaagtacgcggccagcagctatctgagcctgacgcctgagcagtggaagtcccac

SEQ ID NO: 589 - DNA, 677 bp, Artificial Sequence
  Synthetic construct
tctggggagagctctggagaagagctgctcagttaggacccagagggaaccatggaaaccccagcgcagcttctcttcctcctgctactctggctcccagataccaccggagaaattgtgttgacgcagtctccaggcaccctgcctttgtctccaggggaaagagccaccctctcctgcagagccagtcagagtgttagcgacaggcacttagcctggtaccagcagaaacctggccaggctcccaggctcctcatctctggagcatccaccagggccactggcatcccagacaggttcagaggcagtgggtctgggacagacttcactctcaccatcaccagactggagcctgaagattttgcattttattactgtcatcaatatgggagctcacctcggacgttcggccaagggaccaaggtggaaatcaaacgaactgtggctgcaccatctgtcttcatcttcccgccatctgatgagcagttgaaatctggaactgcctctgttgtgtgcctgctgaataacttctatcccagagaggccaaagtacagtggaaggtggataacgccctccaatcgggtaactcccaggagagtgtcacagagcaggacagcaaggacagcacctacagcctcagcagcaccctgacgctgagcaaagcagactacgagaa

SEQ ID NO: 590 - DNA, 719 bp, Artificial Sequence
  Synthetic construct
agggggagagtatgaagagagggagagatctgggggaagctcagcttcagctgtggtagagaagacaggattcaggacaatctccagcatggccggcttccctctcctcctcaccctcctcactcactgtgcagggtcctgggcccagtctgttctgactcagccaccctcagcgtctgggacccccggacagacggtcaccatttcttgttctggaagcagctccaacctcggacccaattatgtgtattggtaccgccaagtcccaggagcggcccccaaactcgtcatctttaggaatgatcagcggccctcgggggtccctgaccgaatctctggctccaagtctggcacctcagcctccctggccatcagtggtctccggtccgaggatgaggctgattattattgtgcagcatgggatgacagcctgaaaatggtgttcggcggagggaccaaggtgaccgtcctcagtcagcccaaggctgccccctcggtcactctgttcccgccctcctctgaggagcttcaagccaacaaggccacactggtgtgtctcataagtgacttctacccgggagccgtgacagtggcctggaaggcagatagcagccccgtcaaggcgggagtggagaccaccacaccctccaaacaaagcaacaacaagtacgcggccagcagctatctgagcctgacgcctgagcagtggaagtcccaca

SEQ ID NO: 591 - DNA, 674 bp, Artificial Sequence
  Synthetic construct
gggtggtcacacctgtgcaggagtcagtcccagtcaggacacagcatggacatgagggtccccgctcagctcctggggctcctgctgctctggctcccaggtgccagatgtgacatccagttgacccagtctccatccttcctgtctgcatctgtcggagacagagtcagcatcacttgccgggccagtcaggacattcggagtcatttagcctggtatcagcaaaaaccagggagagcccctaacctcctgatctatgctgcatcctctttggaacctggggtcccatctaggttcagcggcagtggttctgggacatatttcactctcacaatcagcagcctgcagcctgcagattctgcaacttattactgtcaacaacttaatacttaccctcggaccttcggccaagggacacgactggagattaaacgaactgtggctgcaccatctgtcttcatcttcccgccatctgatgagcagttgaaatctggaactgcctctgttgtgtgcctgctgaataacttctatcccagagaggccaaagtacagtggaaggtggataacgccctccaatcgggtaactcccaggagagtgtcacagagcaggacagcaaggacagcacctacagcctcagcagcaccctgacgctgagcaaagcagactacgagaa

SEQ ID NO: 592 - DNA, 700 bp, Artificial Sequence
  Synthetic construct
gatcaggtttttttcttatatgggggctggggtctcaggaggcagcactctcgggacgtctccaccatggcctgggctctgctcctcctcaccctcctcactcagggcacaggatcctggactcagtctgccctgactcagcctcgctcagtgtccgggtctcttggacagtcagtctccatctcctgcactggatccagcagtgatgttggtactaataattatgtctcctggttccaacaatacccaggcaaagcccccaaacttatcatttatgatgtcaataaacggccctctggggtccctgatcgcttctctggctccaagtctggcaacacggcctccctgaccatctctggactccaggctggggatgaaactgattattactgctgctcatatgcaggcggctacacttggattttcggcggagggaccaagctgaccgtcctaggtcagcccaaggctgccccctcggtcactctgttcccgccctcctctgaggagcttcaagccaacaaggccacactggtgtgtctcataagtgacttctacccgggagccgtgacagtggcctggaaggcagatagcagccccgtcaaggcgggagtggagaccaccacaccctccaaacaaagcaacaacaagtacgcggccagcagctatctgagcctgacgcctgagcagtggaagtcccaca

SEQ ID NO: 593 - DNA, 828 bp, Artificial Sequence
  Synthetic construct
gggggccttttctggcctgatcacctgggcatgggctgctgagagcagaaaggggaggcagattgtctctgcagctgcaagcccagcacccgccccagctgctttgcatgtccctcccagccgccctgcagtccagagcccatatcaatgcctgggtcagagctctggagaagagctgctcagttaggacccagagggaaccatggaaaccccagcgcagcttctcttcctcctgctactctggctcccagataccaccggagaaattgtgttgacgcagtctccaggcaccctgtctttgtctccaggggaaagagccaccctctcgtgcagggccagtcagagtgttagcaacaattacttagcctggtaccagcagaaacttggccaggctcccaggctcctcatctatggtgcatccaacagggccactggcatcccagacaggttcagtggcagtgggtctgggacagacttcactctcaccatcagcggactggagtctgaagattttgcagtgtattactgtcagcagtatggcagtccacctcagacgttcggccaagggaccaaggtggaaaccaaacgaactgtggctgcaccatctgtcttcatcttcccgccatctgatgagcagttgaaatctggaactgcctctgttgtgtgcctgctgaataacttctatcccagagaggccaaagtacagtggaaggtggataacgccctccaatcgggtaactcccaggagagtgtcacagagcaggacagcaaggacagcacctacagcctcagcagcaccctgacgctgagcaaagcagactacgagaa

SEQ ID NO: 594 - DNA, 662 bp, Artificial Sequence
  Synthetic construct
agctgggggagtcagtcccagtcaggacacagcatggacatgagggtccccgctcagctcctggggctcctgctgctctggctcccaggtgccagatgtgacatccagttgacccagtctccatccttcctgtctgcatctgtaggagacagagtcaccatcacttgccgggccagtcagggcattagcagttacttagcctggtatcagcaaaaaccagggaaagcccctaagctcctgatctatgctgcatccactttgcaaagtggggtcccatcaaggttcagcggcagtggatctgggacagaattcactctcacaatcagcagcctgcagcctgaagattttgcaacttattcctgtcaacagtttaatggtttcccccccactttcggcggagggaccaaggtggagatcagacgaactgtggctgcaccatctgtcttcatcttcccgccatctgatgagcagttgaaatctggaactgcctctgttgtgtgcctgctgaataacttctatcccagagaggccaaagtacagtggaaggtggataacgccctccaatcgggtaactcccaggagagtgtcacagagcaggacagcaaggacagcacctacagcctcagcagcaccctgacgctgagcaaagcagactacgagaa

SEQ ID NO: 595 - DNA, 739 bp, Artificial Sequence
  Synthetic construct
ggggcatggatggactctccccctctcagagtatgaagagagggagagatctgggggaagctcagcttcagctgtggtagagaagacaggattcaggacaatctccagcatggccggcttccctctcctcctcaccctcctcactcactgtgcagggtcctgggcccagtctgttctgactcagccaccctcagcgtctgggacccccggacagacggtcaccatttcttgttctggaagcagctccaacctcggacccaattatgtgtattggtaccgccaagtcccaggagcggcccccaaactcgtcatctttaggaatgatcagcggccctcgggggtccctgaccgaatctctggctccaagtctggcacctcagcctccctggccatcagtggtctccggtccgaggatgaggctgattattattgtgcagcatgggatgacagcctgaaaatggtgttcggcggagggaccaaggtgaccgtcctcagtcagcccaaggctgccccctcggtcactctgttcccgccctcctctgaggagcttcaagccaacaaggccacactggtgtgtctcataagtgacttctacccgggagccgtgacagtggcctggaaggcagatagcagccccgtcaaggcgggagtggagaccaccacaccctccaaacaaagcaacaacaagtacgcggccagcagctatctgagcctgacgcctgagcagtggaagtcccac

SEQ ID NO: 596 - DNA, 690 bp, Artificial Sequence
  Synthetic construct
gggatatcaatgcctgggtcagagctctggagaagagctgctcagttaggacccagagggaaccatggaaaccccagcgcagcttctcttcctcctgctactctggctcccagataccaccggagaaattgtgttgacgcagtctccaggcaccctgtctttgtctccaggggaaagagccaccctctcgtgcagggccagtcagagtgttagcaacaattacttagcctggtaccagcagaaacttggccaggctcccaggctcctcatctatggtgcatccaacagggccactggcatcccagacaggttcagtggcagtgggtctgggacagacttcactctcaccatcagcggactggagtctgaagattttgcagtgtattactgtcagcagtatggcagtccacctcagacgttcggccaagggaccaaggtggaaaccaaacgaactgtggctgcaccatctgtcttcatcttcccgccatctgatgagcagttgaaatctggaactgcctctgttgtgtgcctgctgaataacttctatcccagagaggccaaagtacagtggaaggtggataacgccctccaatcgggtaactcccaggagagtgtcacagagcaggacagcaaggacagcacctacagcctcagcagcaccctgacgctgagcaaagcagactacgagaa

SEQ ID NO: 597 - DNA, 703 bp, Artificial Sequence
  Synthetic construct
ggggagtccagagcccatatcaatgcctgggtcagagctctggagaagagctgctcagttaggacccagagggaaccatggaaaccccagcgcagcttctcttcctcctgctactctggctcccagataccaccggagaaattgtgttgacgcagtctccaggcaccctgtctttgtctccaggggaaagagccaccctctcgtgcagggccagtcagagtgttagcaacaattacttagcctggtaccagcagaaacttggccaggctcccaggctcctcatctatggtgcatccaacagggccactggcatcccagacaggttcagtggcagtgggtctgggacagacttcactctcaccatcagcggactggagtctgaagattttgcagtgtattactgtcagcagtatggcagtccacctcagacgttcggccaagggaccaaggtggaaaccaaacgaactgtggctgcaccatctgtcttcatcttcccgccatctgatgagcagttgaaatctggaactgcctctgttgtgtgcctgctgaataacttctatcccagagaggccaaagtacagtggaaggtggataacgccctccaatcgggtaactcccaggagagtgtcacagagcaggacagcaaggacagcacctacagcctcagcagcaccctgacgctgagcaaagcagactacgagaa

SEQ ID NO: 598 - DNA, 779 bp, Artificial Sequence
  Synthetic construct
gggactgagatgagccagccctgcagctgcgcccagcctgccccatcccctgctcatttgcatgttcccagagcacagtctcctgacctgaagacttattaacaggctgatcacaccctgtgcaggagtcagacccagtcaggacaaagcatggacatgagggtccccgctcagctcctggggctcctggcgctctggttcccaggttccagatgcgacatccacatgacccagtctccatcttccgtgtctgcttctgtaggagacaaagtcaccatcacttgtcgggcgagtcagagtattagcagctggttagcctggtatcagcagaaaccagggaaagcccctaaactactgatctctgctgcatctattttgcaaaatggggtcccatcaaggttcagcggcagtgggtctgggacagatttcactctcaccatcagtagcatgcagcctgaagattttgcaacttacttctgtcaacaggctaacagtctccctcgaacttttggccaggggaccaaggtagagatcaaacgaactgtggctgcaccatctgtcttcatcttcccgccatctgatgagcagttgaaatctggaactgcctctgttgtgtgcctgctgaataacttctatcccagagaggccaaagtacagtggaaggtggataacgccctccaatcgggtaactcccaggagagtgtcacagagcaggacagcaaggacagcacctacagcctcagcagcaccctgacgctgagcaaagcagactacgagaa

SEQ ID NO: 599 - DNA, 783 bp, Artificial Sequence
  Synthetic construct
ctcagggtggggtcaaaaacccggggggggggtctgatttgcatggatggactctccccctctcagaatatgaagagagggagagatctgggggaagctcagcttcagctgtggtagagaagacaggattcaggacaatctccagcatggccggcttccctctcctcctcaccctcctcactcactgtgcagggtcctgggcccagtctgttctgactcagccaccctcagcgtctggttcccccgggcagagggtcaccatgtcttgttctggaagcagctccaacatcgaaaataattatgtgtattggtaccagcaactcccaggaacggcccccaaactcctcatctatagggataatcagcggccctcaggggtccctgaccgattctctggctccaagtctggcacctcagcctccctggccatcagtgggctccggtccgaggatgaggctgattattactgtgcagcatgggatgacggcctgaatgggaattgggtgttcggcggagggaccaagctgaccgtcctaggtcagcccaaggctgccccctcggtcactctgttcccgccctcctctgaggagcttcaagccaacaaggccacactggtgtgtctcataagtgacttctacccgggagccgtgacagtggcctggaaggcagatagcagccccgtcaaggcgggagtggagaccaccacaccctccaaacaaagcaacaacaagtacgcggccagcagctacctgagcctgacgcctgagcagtggaagtcccaca

SEQ ID NO: 600 - DNA, 723 bp, Artificial Sequence
  Synthetic construct
ggggcatgtccctcccagctgccctaccttccagagcccatatcaatgcctgggtcagagctctggggaggatctgctcagttaggacccagacggaaccatggaagccccagcgcagcttctcttcctcctgctactctggctcccagataccactgcagagatagtgatgactcagtctccagccaccctgtctgtgtctccgggggacagagccactctctcctgcagggccagtcagagtgtttccaacaacttagcctggtaccagcagagacctggccagactcccagggtcctcatctatgatgtctcttccagggccactggtgtcccagacaggttcagtggcagtgggtctgggacagagttcactttaaccatcagcggcctgcagtctgaagattttgcagtttattattgtcagcagtataataactggcctaggacttttggccaggggaccaagctggaaatcaaacgaactgtggctgcaccatctgtcttcatcttcccgccatctgatgagcagttgaaatctggaactgcctctgttgtgtgcctgctgaataacttctatcccagagaggccaaagtacagtggaaggtggataacgccctccaatcgggtaactcccaggagagtgtcacagagcaggacagcaaggacagcacctacagcctcagcagcaccctgacgctgagcaaagcagactacgagaa

SEQ ID NO: 601 - DNA, 676 bp, Artificial Sequence
  Synthetic construct
gggacactttgtgcaggagtcagacccagtcaggacacagcatggacatgagggtccccgctcagctcctggggctcctgctgctctggctcccaggtgccaaatgtgacatccagatgacccagtctccttccaccctgtctgcatctgtaggagacagagtcaccatcacttgccgggccagtcagagtattactagttggttggcctggtatcagcagaaaccagggaaagcccctaaactcctaatctataaggcgtctagtttagaaagtggggtcccatcaaggttcagcggctctggatctgggacagaattcactctcaccatcagcagcctgcagcctgatgattttgcaacttattactgccaacattatgatagttactctccgaggtacacttttggccaggggaccaagctggagatcaagcgaactgtggctgcaccatctgtcttcatcttcccgccatctgatgagcagttgaaatctggaactgcctctgttgtgtgcctgctgaataacttctatcccagagaggccaaagtacagtggaaggtggataacgccctccaatcgggtaactcccaggagagtgtcacagagcaggacagcaaggacagcacctacagcctcagcagcaccctgacgctgagcaaagcagactacgagaa

SEQ ID NO: 602 - DNA, 759 bp, Artificial Sequence
  Synthetic construct
gggggcaagcccagcacccgccccagctgctttgcatgtccctcccagccgccctgcagtccagagcccatatcaatgcctgggtcagagctctggagaagagctgctcagttaggacccagagggaaccatggaaagcccagcgcagcttctcttcctcctgctactctggctcccagataccaccggagaaattgtgttgacgcagtctccaggtaccctgtctttgtctccaggggaaagagccaccctctcctgcagggccagtcagagacttagcagccactacttagcctggtaccagcagaaacctggccaggctcccaggctcctcatctatgctgcatccagcagggccactggcatcccagacaggttcagtggcagtgtgtctgggacagacttcactctctccatcagcagactggagcctgaagattctgcagtgtattactgtcagcagtatggtaggtcacctcggctcactttcggcggagggaccaaggtggagatcaaacgaactgtggctgcaccatctgtcttcatcttcccgccatctgatgagcagttgaaatctggaactgcctctgttgtgtgcctgctgaataacttctatcccagagaggccaaagtacagtggaaggtggataacgccctccaatcgggtaactcccaggagagtgtcacagagcaggacagcaaggacagcacctacagcctcagcagcaccctgacgctgagcaaagcagactacgagaa

SEQ ID NO: 603 - DNA, 674 bp, Artificial Sequence
  Synthetic construct
gggggtcagagctctggggaggatctgctcagttaggacccagacggaaccatggaagccccagcgcagcttctcttcctcctgctactctggctcccagataccactgcagagatagtgatgactcagtctccagccaccctgtctgtgtctccgggggacagagccactctctcctgcagggccagtcagagtgtttccaacaacttagcctggtaccagcagagacctggccagactcccagggtcctcatctatgatgtctcttccagggccactggtgtcccagacaggttcagtggcagtgggtctgggacagagttcactttaaccatcagcggcctgcagtctgaagattttgcagtttattattgtcagcagtataataactggcctaggacttttggccaggggaccaagctggaaatcaaacgaactgtggctgcaccatctgtcttcatcttcccgccatctgatgagcagttgaaatctggaactgcctctgttgtgtgcctgctgaataacttctatcccagagaggccaaagtacagtggaaggtggataacgccctccaatcgggtaactcccaggagagtgtcacagagcaggacagcaaggacagcacctacagcctcagcagcaccctgacgctgagcaaagcagactacgagaa

SEQ ID NO: 604 - DNA, 680 bp, Artificial Sequence
  Synthetic construct
tagatggggactgatcaggactcctcagttcaccttctcacaatgaggctccctgctcagctcctggggctgctaatgctctgggtctctgaatccagtggggatatcgtgctgactcagtctccactctccctgcccgtcacccctggagagccggcctccatctcctgcaggtctagtcagagcctcctgcatagtaatggaaacaactttttggattggtacctgcagaagccagggcagtctccacaactcctgatctatttgggttctaatcgggcctccggggtccctgacaggttcagtggcagtggatcaggcacagattttacactgagaatcagcagactggaggctgaggatgttggggtttattactgcatgcaagctctacaaaccccgtacacttttggccaggggaccaagctggagatcaaacgaactgtggctgcaccatctgtcttcatcttcccgccatctgatgagcagttgaaatctggaactgcctctgttgtgtgcctgctgaataacttctatcccagagaggccaaagtacagtggaaggtggataacgccctccaatcgggtaactcccaggagagtgtcacagagcaggacagcaaggacagcacctacagcctcagcagcaccctgacgctgagcaaagcagactacgagaa

SEQ ID NO: 605 - DNA, 677 bp, Artificial Sequence
  Synthetic construct
ggggggactgatcaggactcctcagttcaccttctcacaatgaggctccctgctcagctcctggggctgctaatgctctgggtctctgaatccagtggggatatcgtgctgactcagtctccactctccctgcccgtcacccctggagagccggcctccatctcctgcaggtctagtcagagcctccttcatagtaatggaaacaactttttggattggtacctgcagaagccagggcagtctccacaactcctgatctatttgggttctagtcgggcctccggggtccctgacaggttcagtggcagtggatcaggcacagattttacactgagaatcagcagactggaggctgaggatgttggggtttattactgcatgcaagctctacaaaccccgtacacttttggccaggggaccaagctggagatcaaacgaactgtggctgcaccatctgtcttcatcttcccgccatctgatgagcagttgaaatctggaactgcctctgttgtgtgcctgctgaataacttctatcccagagaggccaaagtacagtggaaggtggataacgccctccaatcgggtaactcccaggagagtgtcacagagcaggacagcaaggacagcacctacagcctcagcagcaccctgacgctgagcaaagcagactacgagaa

SEQ ID NO: 606 - DNA, 956 bp, Artificial Sequence
  Synthetic construct
gaggcactgagggccaggagctcactcaggtgagagacttcagcagatccttctctcctgagcaaatcaggtccaaaaaaaattaagttcctgccatcagcatgcacaaacaaggacattcatctcttcagctgagccctgctgtccagggaagcaaaagtctctgagcccaggcccacgtgagggtggggtgaggagaggagcccaggatgctgattttcatggaggccccgccctcctctgaggcagaggggataagacagggctggggcaggcccagtgctggggtcacaagaggcagcgctctcgggacgtctccaccatggcctgggctctgctgctcctcaccctcctcactcaggacacagggtcctgggcccagtctgccctgactcagtctgcctccgtgtctgggtctcctggacagtcgatcaccatctcctgcactggaaccaggaatgatgttggcttttataaccttgtctcctggtaccaacaacaccccggcaaagtccccagattgatgatttatgaggtctccaagcggccctcaggggtttctgatcgcttctctggctccaagtctggcaacacggcctccctgacaatctctgggctccaggctgaagacgaggctcattatttctgctcctcgtatgcaggtagtaacactttgatatttggcggagggaccgaggtgaccgtcctaggtcagcccaaggctgccccctcggtcactctgttcccaccctcctctgaggagcttcaagccaacaaggccacactggtgtgtctcataagtgacttctacccgggagccgtgacagtggcctggaaggcagatagcagccccgtcaaggcgggagtggagaccaccacaccctccaaacaaagcaacaacaagtacgcggccagcagctacctgagcctgacgcctgagcagtggaagtcccaca

SEQ ID NO: 607 - DNA, 668 bp, Artificial Sequence
  Synthetic construct
ggacacctgtgcaggagtcagtcccagtcaggacacagcatggacatgagggtccccgctcagctcctggggctcctgctgctctggctcccaggtgccagatgtgacatccagttggcccagtctccatccttcctgtctgcatctgtaggagccagagtcaccatcacttgccgggccagtcagggcattgccagttatttagcctggtatcagcaaaaaccagggaaagcccctaagctcctgatctatgctgcatccactttgcaaagtggggtcccatcaaggttcagcggcagtggatctgggacagatttcactctcacaatcagcagcctgcagcctgaagattttgcaacttattactgtcaacagtttaatggtttccctcccactttcggcggagggaccaaggtggagatcaaacgaactgtggctgcaccatctgtcttcatcttcccgccatctgatgagcagttgaaatctggaactgcctctgttgtgtgcctgctgaataacttctatcccagagaggccaaagtacagtggaaggtggataacgccctccaatcgggtaactcccaggagagtgtcacagagcaggacagcaaggacagcacctacagcctcagcagcaccctgacgctgagcaaagcagactacgagaa

SEQ ID NO: 608 - DNA, 688 bp, Artificial Sequence
  Synthetic construct
agatgggggctggggtctcaggaggcagcactctcgggacgtctccaccatggcctgggctctgctcctcctcaccctcctcactcagggcacaggatcctggtctcagtctgccctgactcagcctcgctcagtgtccgggtctcctggacagtcactcaccgtctcctgcactggaaccagcagtgatgttggtaattataactctgtctcctggtaccaacagcaccccggcaaagcccccaaactcatgatttatgatgtcgataagcggccctcaggagtccctgatcgcttctctggctccaagtctggcaacacggcctccctgaccatctctgggctccagggtgaggatgaggctgaatactactgctgctcatatgcaggcagctacacttccctttatgtcttcggaactgggaccaaggtcaccgtcctacgtcagcccaaggccaaccccactgtcactctgttcccgccctcctctgaggagctccaagccaacaaggccacactagtgtgtctgatcagtgacttctacccgggagctgtgacagtggcctggaaggcagatggcagccccgtcaaggcgggagtggagaccaccaaaccctccaaacagagcaacaacaagtacgcggccagcagctacctgagcctgacgcccgagcagtggaagtcccac

SEQ ID NO: 609 - DNA, 770 bp, Artificial Sequence
  Synthetic construct
gagggtggggtcacaaagctgggggggtctgatttgcatggatggactctccccctctcagagtatgaagagagggagagatctgggggaagctcagcttcagctgtgggtagagaagacaggactcaggacaatctccagcatggccagcttccctctcctcctcaccctcctcactcactgtgcagggtcctgggcccagtctgtgctgactcagtcaccctcagcgtctgggacccccgggcagagggtcaccatctcttgttctggaagcaactccgacatcggaacttattctgtaaactggtaccaacagctcccaggaacggcccccagacttctcatctatactaataatcagcggccctcaggggtccctgaccggttctctggctccaagtctggcacctcagcctccctggccatcagtgggctccagtctgacgatgaggccgattatttttgtgctgcatgggatggcagcctcgtggttttcggcggagggaccaagctgaccgtcctacgtcagcccaaggctgccccctcggtcactctgttcccgccctcctctgaggagcttcaagccaacaaggccacactggtgtgtctcataagtgacttctacccgggagccgtgacagtggcctggaaggcagatagcagccccgtcaaggcgggagtggagaccaccacaccctccaaacaaagcaacaacaagtacgcggccagcagctatctgagcctgacgcctgagcagtggaagtcccaca

SEQ ID NO: 610 - DNA, 549 bp, Artificial Sequence
  Synthetic construct
ctctcagtcaggacacagcatggacatgagggtccctgctcagctcctggggctcctgctgctctggctctcaggtgccagatgtgacatccagatgacccagtctccatcctccctgtctgcatctgtaggagacagagtcaccatcacttgccaggcgagtcaggacattagcaactatttaaattggtatcagcagaaaccagggaaagcccctaagctcctgatctacgatgcatccaatttggaaacaggggtcccatcaaggttcagtggaagtggatctgggacagattttactttcaccatcagcagcctgcagcctgaagatattgcaacatattactgtcaacagtatgataatctccctcggccgctcactttcggcggagggaccaaggtggagatcaaacgaactgtggctgcaccatctgtcttcatcttcccgccatctgatgagcagttgaaatctggaactgcctctgttgtgtgcctgctgaataacttctatcccagagaggccaaagtacagtggaaggtggataacgc

SEQ ID NO: 611 - DNA, 716 bp, Artificial Sequence
  Synthetic construct
gggctcagagtatgaagagagggagagatctgggggaagctcagcttcagctgtgggtagagaagacaggactcaggacaatctccagcatggccagcttccctctcctcctcaccctcctcactcactgtgcagggtcctgggcccagtctgtgctgactcagtcaccctcagcgtctgggacccccgggcagagggtcaccatctcttgttctggaagcaactccgacatcggaacttattctgtaaactggtaccaacagctcccaggaacggcccccagacttctcatctatactaataatcagcggccctcaggggtccctgaccggttctctggctccaagtctggcacctcagcctccctggccatcagtgggctccagtctgacgatgaggccgattatttttgtgctgcatgggatggcagcctcgtggttttcggcggagggaccaagctgaccgtcctacgtcagcccaaggctgccccctcggtcactctgttcccgccctcctctgaggagcttcaagccaacaaggccacactggtgtgtctcataagtgacttctacccgggagccgtgacagtggcctggaaggcagatagcagccccgtcaaggcgggagtggagaccaccacaccctccaaacaaagcaacaacaagtacgcggccagcagctatctgagcctgacgcctgagcagtggaagtcccac

SEQ ID NO: 612 - DNA, 771 bp, Artificial Sequence
  Synthetic construct
tgggggtggggtcacaaagctgggggggtctgatttgcatggatggactctccccctctcagagtatgaagagagggagagatctgggggaagctcagcttcagctgtgggtagagaagacaggactcaggacaatctccagcatggccagcttccctctcctcctcaccctcctcactcactgtgcagggtcctgggcccagtctgtgctgactcagtcaccctcagcgtctgggacccccgggcagagggtcaccatctcttgttctggaagcaactccgacatcggaacttattctgtaaactggtaccaacagctcccaggaacggcccccagacttctcatctatactaataatcagcggccctcaggggtccctgaccggttctctggctccaagtctggcacctcagcctccctggccatcagtgggctccagtctgacgatgaggccgattatttttgtgctgcatgggatggcagcctcgtggttttcggcggagggaccaagctgaccgtcctacgtcagcccaaggctgccccctcggtcactctgttcccgccctcctctgaggagcttcaagccaacaaggccacactggtgtgtctcataagtgacttctacccgggagccgtgacagtggcctggaaggcagatagcagccccgtcaaggcgggagtggagaccaccacaccctccaaacaaagcaacaacaagtacgcggccagcagctatctgagcctgacgcctgagcagtggaagtcccaca

SEQ ID NO: 613 - DNA, 768 bp, Artificial Sequence
  Synthetic construct
ggggtggggtcacaaagctgggggggtctgatttgcatggatggactctccccctctcagagtatgaagagagggagagatctgggggaagctcagcttcagctgtgggtagagaagacaggactcaggacaatctccagcatggccagcttccctctcctcctcaccctcctcactcactgtgcagggtcctgggcccagtctgtgctgactcagtcaccctcagcgtctgggacccccgggcagagggtcaccatctcttgttctggaagcaactccgacatcggaacttattctgtaaactggtaccaacagctcccaggaacggcccccagacttctcatctatactaataatcagcggccctcaggggtccctgaccggttctctggctccaagtctggcacctcagcctccctggccatcagtgggctccagtctgacgatgaggccgattatttttgtgctgcatgggatggcagcctcgtggttttcggcggagggaccaagctgaccgtcctacgtcagcccaaggctgccccctcggtcactctgttcccgccctcctctgaggagcttcaagccaacaaggccacactggtgtgtctcataagtgacttctacccgggagccgtgacagtggcctggaaggcagatagcagccccgtcaaggcgggagtggagaccaccacaccctccaaacaaagcaacaacaagtacgcggccagcagctatctgagcctgacgcctgagcagtggaagtcccac

SEQ ID NO: 614 - DNA, 658 bp, Artificial Sequence
  Synthetic construct
tggggaggagtcagacccagtcaggacacagcatggacatgagggtccccgctcagctcctggggctcctgctgctctggctcccaggtgccaaatgtgacatccagatgacccagtctccttccaccctgtctgcatctgtaggagacagagtcaccatcacttgccgggccagtcagactattagtagttggttggcctggtatcagcagaaaccaggaaaagcccctaaactcctgatttataaggcgtctagtttacaaagtggggtcccatcaaggttcagcggcagtggatctgggacagaattcactctcaccatcaccagcctgcagcctgatgattttggaacttattactgccaacaatataagacttattacacttttggccaggggaccaagctggagatcaaacgaactgtggctgcaccatctgtcttcatcttcccgccatctgatgagcagttgaaatctggaactgcctctgttgtgtgcctgctgaataacttctatcccagagaggccaaagtacagtggaaggtggataacgccctccaatcgggtaactcccaggagagtgtcacagagcaggacagcaaggacagcacctacagcctcagcagcaccctgacgctgagcaaagcagactacgagaa

SEQ ID NO: 615 - DNA, 665 bp, Artificial Sequence
  Synthetic construct
ggggagagctctggagaagagctgctcagttaggacccagagggaaccatggaaaccccagcgcagcttctcttcctcctgctactctggctcccagataccaccggagacattgtgttgacgcagtcgccagggaccctgtctttgtctccaggggaaagagccgccctctcctgcagggccagtcagagtgtaaccagcagctacttagcctggtaccagcagaagcctggccgggctcccaggctcctcatctatggtgcatccatcagggccaccggcatcccagacaggttcagtggcagtgggtctgggacagacttcactctcaccatcagcagactggagcctgaagattttgcagtgtattactgtcaccactatggtagccaattcggccctgggaccacagtggatatcaaacgaactgtggctgcaccatctgtcttcatcttcccgccatctgatgagcagttgaaatctggaactgcctctgttgtgtgcctgctgaataacttctatcccagagaggccaaagtacagtggaaggtggataacgccctccaatcgggtaactcccaggagagtgtcacagagcaggacagcaaggacagcacctacagcctcagcagcaccctgacgctgagcaaagcagactacgagaa

SEQ ID NO: 616 - DNA, 665 bp, Artificial Sequence
  Synthetic construct
tagatggggaggaatcagtcccactcaggacacagcatggacatgagggtccccgctcagctcctggggctcctgctgctctggttcccaggtgccaggtgtgacatccagatgacccagtctccatctgccatgtctgcatctgtaggagacagagtcaccatcacttgtcgggcgactcagggcgttagcaattctttagcctggtttcagcagaaaccagggaaagtccctaagcgcctgatctatggtgcatccactttgcaaaatggggtcccatcaaggttcagcggcagtggatctgggacagaattcactctcacaatcagcagcctgcagcctgaagattttgcaacttattactgtctacagtatgctaattacccgtacagttttggccaggggaccaagctggagatcaaacgaactgtggctgcaccatctgtcttcatcttcccgccatctgatgagcagttgaaatctggaactgcctctgttgtgtgcctgctgaataacttctatcccagagaggccaaagtacagtggaaggtggataacgccctccaatcgggtaactcccaggagagtgtcacagagcaggacagcaaggacagcacctacagcctcagcagcaccctgacgctgagcaaagcagactacgagaa

SEQ ID NO: 617 - DNA, 688 bp, Artificial Sequence
  Synthetic construct
ctatgggggctggggtctcaggaggcagcactctcgggacgtctccaccatggcctgggctctgctcctcctcaccctcctcactcagggcacaggatcctggtctcagtctgccctgactcagcctcgctcagtgtccgggtctcctggacagtcagtcaccgtctcctgcactggaaccagcactgatgttggtaattataactctgtctcctggtaccgacagcacccaggcaaagcccccaaactcatgatttatgatgtcgataagcggccctcaggagtccctgatcgcttctctggctccaagtctggcaacacggcctccctgaccatctctgggctccaggctgacgatgaggctgattattactgctgctcatatgcaggcagctacctttccctttatgtcttcggaactgggaccaaggtcaccgtcctaggtcagcccaaggccaaccccactgtcactctgttcccgccctcctctgaggagctccaagccaacaaggccacactagtgtgtctgatcagtgacttctacccgggagctgtgacagtggcctggaaggcagatggcagccccgtcaaggcgggagtggagaccaccaaaccctccaaacagagcaacaacaagtacgcggccagcagctacctgagcctgacgcccgagcagtggaagtcccac

SEQ ID NO: 618 - DNA, 800 bp, Artificial Sequence
  Synthetic construct
gggacactgagctgctgctgagttactgagatgagccagccctgcagctgcgcccagcctgccccatcccctgctcatttgcatgttcccagagcacagcctcctgccctgaagccttattaataggctggacacacttcatgcaggaatcagtcccactcaggacacagcatggacatgagggtccccgctcagctcctggggctcctgctgctctggttcccaggtgccaggtgtgacatccagatgacccagtctccatctgccatgtctgcatctgtaggagacagagtcaccatcacttgtcgggcgactcagggcgttagcaattctttagcctggtttcagcagaaaccagggaaagtccctaagcgcctgatctatggtgcatccactttgcaaaatggggtcccatcaaggttcagcggcagtggatctgggacagaattcactctcacaatcagcagcctgcagcctgaagattttgcaacttattactgtctacagtatgctaattacccgtacagttttggccaggggaccaagctggagatcaaacgaactgtggctgcaccatctgtcttcatcttcccgccatctgatgagcagttgaaatctggaactgcctctgttgtgtgcctgctgaataacttctatcccagagaggccaaagtacagtggaaggtggataacgccctccaatcgggtaactcccaggagagtgtcacagagcaggacagcaaggacagcacctacagcctcagcagcaccctgacgctgagcaaagcagactacgagaa

SEQ ID NO: 619 - DNA, 698 bp, Artificial Sequence
  Synthetic construct
acgttcactcggtttcttatatgggggctggggtctcaggaggcagcgctctcgggacgtctccaccatggcctgggctctgctgctcctcaccctcctcactcagggcacagggtcctgggcccagtctgccctgactcagcctgcctccgtatctgggtctcctggacagtcgatcaccatctcctgcactggaaccagcagtgacgtcggtaatggtaactatgtctcctggtaccaacaacacccaggtaaagcccccaaactcatgatttatgaaggtactaagcggccctcaggagtttctaatcgcttctctggcgccaagtctggcaacacggcctccctgaccatctctgggctccagcctgccgacgaggctgactattattgcagctcatatgcaggcagttccgttgtattcggcggagggaccaaagtgaccgtcctgggtcagcccaaggctgccccctcggtcactctgttcccgccctcctctgaggagcttcaagccaacaaggccacactggtgtgtctcataagtgacttctacccgggagccgtgacagtggcctggaaggcagatagcagccccgtcaaggcgggagtggagaccaccacaccctccaaacaaagcaacaacaagtacgcggccagcagctatctgagcctgacgcctgagcagtggaagtcccaca

SEQ ID NO: 620 - DNA, 683 bp, Artificial Sequence
  Synthetic construct
tcttagatgggggctggggtctcaggaggcagcgctctcgggacgtctccaccatggcctgggctctgctgctcctcaccctcctcactcagggcacagggtcctgggcccagtctgccctgactcagcctgcctccgtatctgggtctcctggacagtcgatcaccatctcctgcactggaaccagcagtgacgtcggtaatggtaactatgtctcctggtaccaacaacacccaggtaaagcccccaaactcatgatttatgaaggtactaagcggccctcaggagtttctaatcgcttctctggcgccaagtctggcaacacggcctccctgaccatctctgggctccagcctgccgacgaggctgactattattgcagctcatatgcaggcagttccgttgtattcggcggagggaccaaagtgaccgtcctgggtcagcccaaggctgccccctcggtcactctgttcccgccctcctctgaggagcttcaagccaacaaggccacactggtgtgtctcataagtgacttctacccgggagccgtgacagtggcctggaaggcagatagcagccccgtcaaggcgggagtggagaccaccacaccctccaaacaaagcaacaacaagtacgcggccagcagctatctgagcctgacgcctgagcagtggaagtcccac

SEQ ID NO: 621 - DNA, 696 bp, Artificial Sequence
  Synthetic construct
ggagagcccatatcaatgcctgggtcagagctctggagaagagctgctcagttaggacccagagggaaccatggaaaccccagcgcagcttctcttcctcctgctactctggctcccagatatcaccggagagattgtgttgacgcagtctccaggcaccctgtctttgtctccaggggatagagccaccctctcctgcagggccagacagagtcttagaagcagtttcttagcctggtaccagcataaacctggccaggctcccaggctcctcatctatggtgcatccagcagggccactggcatcccagacagattcagtggcagtgggtctgggacagacttcagtctcaccatcagcagactggagcctgaagattttgcagtttattactgtcagcagtatggagactcacctccgacgttcggccgagggaccaaggtggagatcaaacgaactgtggctgcaccatctgtcttcatcttcccgccatctgatgagcagttgaaatctggaactgcctctgttgtgtgcctgctgaataacttctatcccagagaggccaaagtacagtggaaggtggataacgccctccaatcgggtaactcccaggagagtgtcacagagcaggacagcaaggacagcacctacagcctcagcagcaccctgacgctgagcaaagcagactacgagaa

SEQ ID NO: 622 - DNA, 669 bp, Artificial Sequence
  Synthetic construct
gggacacctgtgcaggagtcagtcccagtcaggacacagcatggacatgagggtccccgctcagctcctggggctcctgctgctctggctcccaggtgccagatgtgacatccagttggcccagtctccatccttcctgtctgcatctgtaggagacagagtcaccatcacttgccgggccagtcagggcattagcagttatttagcctggtatcagcaaaaaccagggaaagcccctaagctcctgatctatgctgcatccactttgcaaagtggggtcccatcaaggttcagcggcagtggatctgggacagatttcactctcacaatcagcagcctgcagcctgaagattttgcaagttattactgtcaacagtttaatagttaccctcccactttcggcggagggaccaaggtggagatcaaacgaactgtggctgcaccatctgtcttcatcttcccgccatctgatgagcagttgaaatctggaactgcctctgttgtgtgcctgctgaataacttctatcccagagaggccaaagtacagtggaaggtggataacgccctccaatcgggtaactcccaggagagtgtcacagagcaggacagcaaggacagcacctacagcctcagcagcaccctgacgctgagcaaagcagactacgagaa

SEQ ID NO: 623 - DNA, 679 bp, Artificial Sequence
  Synthetic construct
atatggggactgatcaggactcctcagttcaccttctcacaatgaggctccctgctcagctcctggggctgctaatgctctgggtctctgaatccagtggggatatcgtgctgactcagtctccactctccctgcccgtcacccctggagagccggcctccatctcctgcaggtctagtcagagcctcctgcatagtaatggaaacaactttttggattggtacctgcagaagccagggcagtctccacagctcctgatctatttgggttctaatcgggcctccggggtccctgacaggttcagtggcagtggatcaggcacagattttacactgaaaatcagcagactggaggctgaggatgttggggtttattactgcatgcaagctctacaaaccccgtacacttttggccaggggaccaagctggagatcaaacgaactgtggctgcaccatctgtcttcatcttcccgccatctgatgagcagttgaaatctggaactgcctctgttgtgtgcctgctgaataacttctatcccagagaggccaaagtacagtggaaggtggataacgccctccaatcgggtaactcccaggagagtgtcacagagcaggacagcaaggacagcacctacagcctcagcagcaccctgacgctgagcaaagcagactacgagaa

SEQ ID NO: 624 - DNA, 692 bp, Artificial Sequence
  Synthetic construct
gggagctgtaactgtgccttgactgatcaggactcctcagttcaccttctcacaatgaggctccctgctcagctcctggggctgctaatgctctgggtctctgaatccagtggggatatcgtgctgactcagtctccactctccctgcccgtcacccctggagagccggcctccatctcctgcaggtctagtcagagcctcctgcatagtaatggaaacaactttttggattggtacctgcagaagccagggcagtctccacagctcctgatctatttgggttctaatcgggcctccggggtccctgacaggttcagtggcagtggatcaggcacagattttacactgaaaatcagcagactggaggctgaggatgttggggtttattactgcatgcaagctctacaaaccccgtacacttttggccaggggaccaagctggagatcaaacgaactgtggctgcaccatctgtcttcatcttcccgccatctgatgagcagttgaaatctggaactgcctctgttgtgtgcctgctgaataacttctatcccagagaggccaaagtacagtggaaggtggataacgccctccaatcgggtaactcccaggagagtgtcacagagcaggacagcaaggacagcacctacagcctcagcagcaccctgacgctgagcaaagcagactacgagaa

SEQ ID NO: 625 - DNA, 656 bp, Artificial Sequence
  Synthetic construct
tgggggagtcagtcccagtcaggacacagcatggacatgagggtccccgctcagctcctggggctcctgctgctctggctcccaggtgccagatgtgacatccagttgacccagtctccatccttcctgtctgcatctgtcggagacagagtcaccatctcttgccgggccagtcaagacattagtaattatttagcctggtatcagcaaagaccagggaaagcccctacactcttgatctatgctgcatccactttgcaaagtggggtcccatcaaggttcagcggcagtggatctgggacagaattcactctcacaatcagcagcctgcagcctgaagattttgcaacttattcgtgtcaacaatttaagagtttcccttctttcggcggagggaccaaggtggagatcaaacgaactgtggctgcaccatctgtcttcatcttcccgccatctgatgagcagttgaaatctggaactgcctctgttgtgtgcctgctgaataacttctatcccagagaggccaaagtacagtggaaggtggataacgccctccaatcgggtaactcccaggagagtgtcacagagcaggacagcaaggacagcacctacagcctcagcagcaccctgacgctgagcaaagcagactacgagaa

SEQ ID NO: 626 - DNA, 746 bp, Artificial Sequence
  Synthetic construct
ggggctgcctgccccaccccctgccgatttgcttgttcccagagcaccaccccctgccctaaagacttcttaataggctggtcacacctgtgcaggagtcagtcccagtcaggacacagcatggacatgagggtccccgctcagctcctggggctcctgctgctctggctcccaggtgccagatgtgacatccagttgacccagtctccatccttcctgtctgcatctgtaggagacagagtcaccatcacttgccgggccagtcacgacattagtagttatttggcctggtatcagcaaaaaccagggaaagcccctaacctcctgatctatgctgcatccactttgcaaagtggggtcccatcaaggttcagcggcagtggctctgggacagaattcactctcacaatcagcagcctgcagcctgaagattttgcaacttattactgtcaacagtttaatagtttccctactttcggcggagggaccaaggtggagatcaaacgaactgtggctgcaccatctgtcttcatcttcccgccatctgatgagcagttgaaatctggaactgcctctgttgtgtgcctgctgaataacttctatcccagagaggccaaagtacagtggaaggtggataacgccctccaatcgggtaactcccaggagagtgtcacagagcaggacagcaaggacagcacctacagcctcagcagcaccctgacgctgagcaaagcagactacgagaa

SEQ ID NO: 627 - DNA, 671 bp, Artificial Sequence
  Synthetic construct
gaggtgtttcttatatgggggagtcagtcccagtcaggacacagcatggacatgagggtccccgctcagctcctggggctcctgctgctctggctcccaggtgccagatgtgacatccagttgacccagtctccatccttcctgtctgcatctgtaggagacagagtcaccatcacttgccgggccagtcacgacattagtagttatttggcctggtatcagcaaaaaccagggaaagcccctaacctcctgatctatgctgcatccactttgcaaagtggggtcccatcaaggttcagcggcagtggctctgggacagaattcactctcacaatcagcagcctgcagcctgaagattttgcaacttattactgtcaacagtttaatagtttccctactttcggcggagggaccaaggtggagatcaaacgaactgtggctgcaccatctgtcttcatcttcccgccatctgatgagcagttgaaatctggaactgcctctgttgtgtgcctgctgaataacttctatcccagagaggccaaagtacagtggaaggtggataacgccctccaatcgggtaactcccaggagagtgtcacagagcaggacagcaaggacagcacctacagcctcagcagcaccctgacgctgagcaaagcagactacgagaa

SEQ ID NO: 628 - DNA, 673 bp, Artificial Sequence
  Synthetic construct
ctcggaatgtttcttatatggggagtcagtcccagtcaggacacagcatggacatgagggtccccgctcagctcctggggctcctgctgctctggctcccaggtgccagatgtgacatccagttgacccagtctccatccttcctgtctgcatctgtaggagacagagtcaccatcacttgccgggccagtcacgacattagtagttatttggcctggtatcagcaaaaaccagggaaagcccctaacctcctgatctatgctgcatccactttgcaaagtggggtcccatcaaggttcagcggcagtggctctgggacagaattcactctcacaatcagcagcctgcagcctgaagattttgcaacttattactgtcaacagtttaatagtttccctactttcggcggagggaccaaggtggagatcaaacgaactgtggctgcaccatctgtcttcatcttcccgccatctgatgagcagttgaaatctggaactgcctctgttgtgtgcctgctgaataacttctatcccagagaggccaaagtacagtggaaggtggataacgccctccaatcgggtaactcccaggagagtgtcacagagcaggacagcaaggacagcacctacagcctcagcagcaccctgacgctgagcaaagcagactacgagaa

SEQ ID NO: 629 - DNA, 685 bp, Artificial Sequence
  Synthetic construct
ggaggcccagtgctggggtcacaagaggcagcgctctcgggacgtctccaccatggcctgggctctgctgctcctcaccctcctcactcaggacacagggtcctgggcccagtctgccctgactcagcctgcctccgtgtctgggtctcctggacagtcgatcaccatctcctgcactggaaccagcagtgatgttgggagttataaccttgtctcctggtaccaacagcacccaggcaaagcccccaaactcataatttatgaggtcactaagcggccctcaggggtttctgatcgcttctctggctccaagtctggcaacacggcctccctgacaatctctgggctccaggctgaggacgaggctgattattactgctgctcatatgcaggtagtaacactgtgttattcggcggagggaccaagctgaccgtcctaggtcagcccaaggctgccccctcggtcactctgttcccaccctcctctgaggagcttcgagccaacaaggccacactggtgtgtctcataagtgacttctacccgggagccgtgacagtggcctggaaggcagatagcagccccgtcaaggcgggagtggagaccaccacaccctccaaacaaagcaacaacaagtacgcggccagcagctacctgagcctgacgcctgagcagtggaagtcccac

SEQ ID NO: 630 - DNA, 715 bp, Artificial Sequence
  Synthetic construct
tcggtaagtgtgcgtcatgggccacctgtcttatctgggggggtcagagctctggagaagagctgctcagttaggacccagagggaaccatggaaaccccagcgcagcttctcttcctcctgctactctggctcccagatattaccggagaaattgtgttgacgcagtctccaggcaccctgtctttgtctccaggggaaagagccaccctctcctgcagggccagtcagagtattagcagcaactacttagcctggtaccagcacaaacctggccaggctcccaggctcctcataaatgatgcatcaaacagggccactggcatcccagacaggttcagtggcagtgggtctgggacagacttcagtctcaccatcaacagactggagcctgaagatgttgcaatatattactgtcaccagtatggaaactcaccgtggacgctcggccaagggaccaaggtggaaatcaaacgaactgtggctgcaccatctgtcttcatcttcccgccatctgatgagcagttgaaatctggaactgcctctgttgtgtgcctgctgaataacttctatcccagagaggccaaagtacagtggaaggtggataacgccctccaatcgggtaactcccaggagagtgtcacagagcaggacagcaaggacagcacctacagcctcagcagcaccctgacgctgagcaaagcagactacgagaa

SEQ ID NO: 631 - DNA, 672 bp, Artificial Sequence
  Synthetic construct
ttcgtagatggggaggagtcagacccagtcaggacacagcatggacatgagggtccccgctcagctcctggggctcctgctgctctggctcccaggtgccaaatgtgacatccagatgacccagtctccttccaccctgtctgcatctgtaggagacagagtcgtcatcacttgccgggccagtcagactattagtaactggttggcctggtatcagcagaaaccagggaaagcccctaaactcctgatctatgaggcgtctactttacaaagtggggtcccatcaaggttcagcggcagtggatctgggacagaattcactctcaccatcaacagcctgcagcctgatgactttgcaacttattactgccatcaatatgataattattcggggtccagttttggccaggggaccaagctggagatcaaacgaactgtggctgcaccatctgtcttcatcttcccgccatctgatgagcagttgaaatctggaactgcctctgttgtgtgcctgctgaataacttctatcccagagaggccaaagtacagtggaaggtggataacgccctccaatcgggtaactcccaggagagtgtcacagagcaggacagcaaggacagcacctacagcctcagcagcaccctgacgctgagcaaagcagactacgagaa

SEQ ID NO: 632 - DNA, 691 bp, Artificial Sequence
  Synthetic construct
gggatatcaatgcctgggtcagagctctggagaagagctgctcagttaggacccagagggaaccatggaaaccccagcgcagcttctcttcctcctgctactctggctcccagagaccaccggagaaatagtgttgacgcagtctccaggcaccctgtctttgtctccaggggaaagagccaccctctcctgcagggccagtgagacttttggtagcagaaagttagcctggtaccagcagaaacctggccaggctcccaggctcctcatctatggtgcatccagcagggccactggcgtcccagacaggttcagtggcagtgggtctgggacagacttcactctcaccatcagcagagtggagtctgaagattttgcagtgtattactgtcaacagtatggtggctcacagtacacttttggccaggggaccaagctggagatcaaaagaactgtggctgcaccatctgtcttcatcttcccgccatctgatgagcagttgaaatctggaactgcctctgttgtgtgcctgctgaataacttctatcccagagaggccaaagtacagtggaaggtggataacgccctccaatcgggtaactcccaggagagtgtcacagagcaggacagcaaggacagcacctacagcctcagcagcaccctgacgctgagcaaagcagactacgagaac

SEQ ID NO: 633 - DNA, 732 bp, Artificial Sequence
  Synthetic construct
gggactctcagagtatgaagaggggcagggagagatttggggaggctctgcttcagctgtgggcacaagaggcagcactcaggacaatctccagcatggcctggtctcctctcctcctcactctcctcgctcactgcacagggtcctgggcccagtctgtgctgacgcagccgccctcagtgtctggggccccaggacagagggtcaccatttcctgcactgggagcaggtccaacatcggggcaggttatcgtgtacactggtaccagcagcttccaggaagagcccccaaactcctcatctttgctaacaccgatcggccctcaggagtccctgaccgattctctggctccaagtctggcacctcagcctccctggccatcactgggctccaggctgaggatgaggctgattattactgccagtcgtatgacagcagcctgagtggtgcagtcttcggcggagggaccaagctgaccgtcctgggtcagcccaaggctgccccctcggtcactctgttcccgccctcctctgaggagcttcaagccaacaaggccacactggtgtgtctcataagtgacttctacccgggagccgtgacagtggcctggaaggcagatagcagccccgtcaaggcgggagtggagaccaccacaccctccaaacaaagcaacaacaagtacgcggccagcagctatctgagcctgacgcctgagcagtggaagtcccaca

SEQ ID NO: 634 - DNA, 671 bp, Artificial Sequence
  Synthetic construct
gtattatttcttatatgggggagtcagacccagtcaggacacagcatggacatgagggtccccgctcagctcctggggctcctgctgctctggctcccaggtgccaaatgtgacatccagatgacccagtctccctccaccctgtctgcatctgtgggagacagagtcaacatcacttgccgggccagtcagagtattagaagctggttggcctggtatcagcagaagccagggagagcccctaaactcttgatctataaggcgtctagtttagaaagtggggtcccttcaaggttcagcggcagtggatctgggacagaattcactctcaccgtcagcagcctgcagcctgatgattttgcaacttattactgccaacagtacaatagtttttactcttttggccaggggaccaaactggacctcaaacgaactgtggctgcaccatctgtcttcatcttcccgccatctgatgagcagttgaaatctggaactgcctctgttgtgtgcctgctgaataacttctatcccagagaggccaaagtacagtggaaggtggataacgccctccaatcgggtaactcccaggagagtgtcacagagcaggacagcaaggacagcacctacagcctcagcagcaccctgacgctgagcaaagcagactacgagaa

SEQ ID NO: 635 - DNA, 680 bp, Artificial Sequence
  Synthetic construct
tatctgggggctggggtctcaggaggcagcactctcgggacgtctccaccatggcctgggctctgctcctcctcagcctcctcactcagggcacaggatcctgggctcagtctgccctgactcagcctcgctcagtgtccgggtctcctggacagtcagtcaccatctcctgcactggagccagcagtgatgttgttggttataactatgtctcctggtaccaaaagcacccaggcaaagcccccaaaattatgatttatgatgtcaataagcggccctcaggggtccctgatcgcttctctggctccaagtctggcaacacggcctccctgaccatctctgggctccaggctgaagatgaggctgaattttactgctgctcatatgcaggcagtcatgtggtttttggcggagggaccaagctgatcgtcctaggtcagcccaaggctgccccctcggtcactctgttcccaccctcctctgaggagcttcaagccaacaaggccacactggtgtgtctcataagtgacttctacccgggagccgtgacagtggcctggaaggcagatagcagccccgtcaaggcgggagtggagaccaccacaccctccaaacaaagcaacaacaagtacgcggccagcagctacctgagcctgacgcctgagcagtggaagtcccac

SEQ ID NO: 636 - DNA, 681 bp, Artificial Sequence
  Synthetic construct
tatctgggggactgatcaggactcctcagttcaccttctcacaatgaggctccctgctcagctcctggggctgctaatgctctgggtctctggatccagtggagatattgtgctgactcagtctccactctccctgcccgtcattcctggagagccggcctccatctcctgcaggtctagtcagagcctcctgtatagtaatggatacaagtatttggattggtacctgcagaagccagggcagtctccacagctcctggtctacttgggttctaatcgggcctccggggtccctgacaggttcagtggcagtggatcaggcacagattttacattgaaaatcagcagagtggaggctgaggatgttggggtttattactgcatgcaaagtctacaaactcctcacagttttggccaggggaccaagctggagatcaaacgaactgtggctgcaccatctgtcttcatcttcccgccatctgatgagcagttgaaatctggaactgcctctgttgtgtgcctgctgaataacttctatcccagagaggccaaagtacagtggaaggtggataacgccctccaatcgggtaactcccaggagagtgtcacagagcaggacagcaaggacagcacctacagcctcagcagcaccctgacgctgagcaaagcagactacgagaa

SEQ ID NO: 637 - DNA, 684 bp, Artificial Sequence
  Synthetic construct
gggggaggctggtcacactttgtgcaggagtcagacccagtcaggacacagcatggacatgagggtccccgctcagctcctggggctcctgctgctctggctcccaggtgccaaatgtgacatccagatgacccagtctccttccaccctgtctgcatctgtaggagacagagtcaccatcacttgccgggccagtcagagtattagtagctggttggcctggtatcagcagaaaccagggaaagcccctaagctcctgatctatcaggcgtctagtttagaaagtggggtcccatcaaggttcagcggcagtggatctgggacagaattcactctcaccatcagcagcctgcagcctgatgattttgcaacttattactgccaacagtccgggcagcagtccgggctcactttcggcggagggaccaaggtggacatcaaacgaactgtggctgcaccatctgtcttcatcttcccgccatctgatgagcagttgaaatctggaactgcctctgttgtgtgcctgctgaataacttctatcccagagaggccaaagtacagtggaaggtggataacgccctccaatcgggtaactcccaggagagtgtcacagagcaggacagcaaggacagcacctacagcctcagcagcaccctgacgctgagcaaagcagactacgagaa

SEQ ID NO: 638 - DNA, 664 bp, Artificial Sequence
  Synthetic construct
tggggtgcaggagtcagtctcagtcaggacacagcatggacatgagggtccccgctcagctcctggggctcctgctactctggctccgaggtgccagatgtgacatccagatgacccagtctccatcctccctgtctgcatctgtgggagacagagtcaccatcacttgccgggcaagtcagacccttagcagcaatttaaattggtatcaacaaaaaccagggaaagcccctaggctcctgatctatgctgcatccactttgcaaagtggggtcccatcaaggttcagtggcagtggatctgggacagatttcactctcaccatcagcagtctgcaacctgaagattttgcaacttactactgtcaacagagtttcagttcccctctcactttcggcggagggaccaaggtggagatcaaacgaactgtggctgcaccatctgtcttcatcttcccgccatctgatgagcagttgaaatctggaactgcctctgttgtgtgcctgctgaataacttctatcccagagaggccaaagtacagtggaaggtggataacgccctccaatcgggtaactcccaggagagtgtcacagagcaggacagcaaggacagcacctacagcctcagcagcaccctgacgctgagcaaagcagactacgagaa

SEQ ID NO: 639 - DNA, 759 bp, Artificial Sequence
  Synthetic construct
gggacacagctcctcctgcagcagcccctgactgctgatttgcatcacgggccgctctttccagcaaggggataagagaggcctggaagaacctgcccagcctgggcctcaggaagcagcatcggaggtgcctcagccatggcatggatccctctcttcctcggcgtccttgcttactgcacaggatccgtggcctcctatgaactgactcagccaccctcagtgtccgtgtccccaggacagacagccagcctcacctgctctggagataaattgggggataaatatgcttgctggtatcttcagaagccaggccagtcccctgtcctggtcatttatcaagataacaagcggccctcagggatccctgagcgattctctggctccaactctgggaacacagccactctgaccatcagcgggacccaggctatggatgaggctgactattactgtcaggcgtggggcagcagcactgtggtattcggcggagggaccaagctgaccgtcctaggtcagcccaaggctgccccctcggtcactctgttcccgccctcctctgaggagcttcaagccaacaaggccacactggtgtgtctcataagtgacttctacccgggagccgtgacagtggcctggaaggcagatagcagccccgtcaaggcgggagtggagaccaccacaccctccaaacaaagcaacaacaagtacgcggccagcagctatctgagcctgacgcctgagcagtggaagtcccac

SEQ ID NO: 640 - DNA, 684 bp, Artificial Sequence
  Synthetic construct
gggggaggctggtcacactttgtgcaggagtcagacccagtcaggacacagcatggacatgagggtccccgctcagctcctggggctcctgctgctctggctcccaggtgccaaatgtgacatccagatgacccagtctccttccaccctgtctgcatctgtaggagacagagtcaccatcacttgccgggccagtcagagtattagtagctggttggcctggtatcagcagaaaccggggatagcccctaagctcctgatctataaggcgtctagtttagaaagtggggtcccatcaaggttcagcggcagtggatctgggacagaattcagtctcaccatcagcagcctgcagcctgatgattttgcaacttattactgccaacactatggtagttattttacgtggacgttcggccaagggaccaaggtggaagtcaaacgaactgtggctgcaccatctgtcttcatcttcccgccatctgatgagcagttgaaatctggaactgcctctgttgtgtgcctgctgaataacttctatcccagagaggccaaagtacagtggaaggtggataacgccctccaatcgggtaactcccaggagagtgtcacagagcaggacagcaaggacagcacctacagcctcagcagcaccctgacgctgagcaaagcagactacgagaa

SEQ ID NO: 641 - DNA, 680 bp, Artificial Sequence
  Synthetic construct
tgggaggctggacacacttcatgcaggaatcagtcccactcaggacacagcatggacatgagggtccccgctcagctcctggggctcctgctgctctggttcccaggtgccaggtgtgacatccagatgacccagtctccatctgccatgtctgcatctataggagacagagtcaccatcacttgtcgggcgagtcagggcattaccaattctttagcctggtttcagcagaagccagggaaagtccctaagcgcctgatctatgctgcatccactttgcaaagtggggtcccatcaaggttcagcggcagtggatctgggacagaattcactctcacaatcaccagcctgcagcctgaagattttgcaacttattactgtctacagcataatagttacccgtggacgttcggccaagggacgaaggtggaaatcaaacgaactgtggctgcaccatctgtcttcatcttcccgccatctgatgagcagttgaaatctggaactgcctctgttgtgtgcctgctgaataacttctatcccagagaggccaaagtacagtggaaggtggataacgccctccaatcgggtaactcccaggagagtgtcacagagcaggacagcaaggacagcacctacagcctcagcagcaccctgacgctgagcaaagcagactacgagaa

SEQ ID NO: 642 - DNA, 784 bp, Artificial Sequence
  Synthetic construct
gggagccctgggagggagccgatttgcatggaatgtgatgtccctgcacacttcttcactgagggaataagaggctttagggcctcaggctcagctgagagactgaagaacccagcattgcagcagctccaccatggcctgggctcctctgctcctcaccctcctcagtctcctcacagggtccctctcccagcctgtgctgactcagccaccttctacatcagcctccctgggagcctcggtcacactcacctgcaccctgagcagcggctacaataattataaagtggcctggtaccagcagagaccagggaagggcccccggtttgtgatgcgagtgggcactggtgggattgtggaatccaagggggatggcatccctgatcgcttctcagtcttgggctcaggcctgaatcggtacctgaccatcaagaacatccaggaagaggatgagagtgactactactgtggggcagaccatggcactgggaacaacttcgtgtgggttttcggcggagggaccaagctgaccgtcctaggtcagcccaaggctgccccctcggtcactctgttcccgccctcctctgaggagcttcaagccaacaaggccacactggtgtgtctcataagtgacttctacccgggagccgtgacagtggcctggaaggcagatagcagccccgtcaaggcgggagtggagaccaccacaccctccaaacaaagcaacaacaagtacgcggccagcagctatctgagcctgacgcctgagcagtggaagtcccac

SEQ ID NO: 643 - DNA, 749 bp, Artificial Sequence
  Synthetic construct
ggggagcctgccccatcccctgctcatttgcatgttcccagagcacaacctcctgccctgaagccttattaataggctggtcagactttgtgcaggaatcagacccagtcaggacacagcatggacatgagagtcctcgctcagctcctggggctcctgctgctctgtttcccaggtgccagatgtgacatccagatgacccagtctccatcctcactgtctgcatctgtaggagacagagtcaccatcacttgtcgggcgagtcagggcattaccaataatttagcctggtttcagcagaaaccagggaaagcccctaagtccctgatctatgctgcctccagtttgcaaactggggtcccgtcaaagttcagcggcagtggatctgggacagatttcactctcaccatcagcagcctgcagcctgaagattttgcaacttattactgccaacagtataatagttacccgtacagttttggccaggggaccaagctggagatcacaggaactgtggctgcaccatctgtcttcatcttcccgccatctgatgagcagttgaaatctggaactgcctctgttgtgtgcctgctgaataacttctatcccagagaggccaaagtacagtggaaggtggataacgccctccaatcgggtaactcccaggagagtgtcacagagcaggacagcaaggacagcacctacagcctcagcagcaccctgacgctgagcaaagcagactacgagaa

SEQ ID NO: 644 - DNA, 676 bp, Artificial Sequence
  Synthetic construct
tatctggggagagctctggggaggaactgctcagttaggacccagacggaaccatggaagccccagcgcagcttctcttcctcctgctactctggctcccagataccactggagaaatagtgatgacgcagtctccagccaccctgtctgtgtctccaggggaaagagccaccctctcctgcggggccagtcagagtcttagcagcaacttagcctggtaccagcagaaacctggccaggctcccaggctcctcatgtatggtgcatccaccagggccactggtatcccagccaggttcagtggcagtgggtctgggacagagttcactctcaccatcagcagcctgcagtctgaagattttgcagtttattattgtcagcagtataataagtggccgctcaccttcggcggagggaccaaggtggagatcaaacgaactgtggctgcaccatctgtcttcatcttcccgccatctgatgagcagttgaaatctggaactgcctctgttgtgtgcctgctgaataacttctatcccagagaggccaaagtacagtggaaggtggataacgccctccaatcgggtaactcccaggagagtgtcacagagcaggacagcaaggacagcacctacagcctcagcagcaccctgacgctgagcaaagcagactacgagaa

SEQ ID NO: 645 - DNA, 678 bp, Artificial Sequence
  Synthetic construct
ggaggctggtcagactttgtgcaggaatcagacccagtcaggacacagcatggacatgagagtcctcgctcagctcctggggctcctgctgctctgtttcccaggtgccagatgtgacatccagatgacccagtctccatcctcactgtctgcatctgtaggagacagagtcaccatcacttgtcgggcgagtcagggcattagcaattctttagcctggtttcagcagaaaccaggggaagcccctaagtccctgatctatggtgcatccagtttgcaaagtggggtcccatcaaagttcagcggcagtggatctgggacagatttcactctcaccatcagcagcctgcagcctgaagattttgcaacttattactgccaacagtatagtacttaccctatcaccttcggccaagggacacgactggagattacacgaactgtggctgcaccatctgtcttcatcttcccgccatctgatgagcagttgaaatctggaactgcctctgttgtgtgcctgctgaataacttctatcccagagaggccaaagtacagtggaaggtggataacgccctccaatcgggtaactcccaggagagtgtcacagagcaggacagcaaggacagcacctacagcctcagcagcaccctgacgctgagcaaagcagactacgagaa

SEQ ID NO: 646 - DNA, 686 bp, Artificial Sequence
  Synthetic construct
gaactttcttatatgggacacaccctgtgcaggagtcagacccagtcaggacacagcatggacatgagggtccccgctcagctcctggggctcctgctgctctggttcccaggttccagatgcgacatccagatgacccagtctccatcttccgtgtctgcatctgtaggagacagagtcaccatcacttgtcgggcgagtcagggtattagcagctacttagcctggtatcagcagataccagggaaagcccctaaactcttgatctatgctgcatccagtttgcaaagtggggtcccatcaaggttcagcggcagtggatctgggacagatttcactctcaccatcagcagcctgcagcctgaagattttgcaacttactattgtcaacaggctaacagtttccctctcactttcggcggagggaccaaggtggacatcaaacgaactgtggctgcaccatctgtcttcatcttcccgccatctgatgagcagttgaaatctggaactgcctctgttgtgtgcctgctgaataacttctatcccagagaggccaaagtacagtggaaggtggataacgccctccaatcgggtaactcccaggagagtgtcacagagcaggacagcaaggacagcacctacagcctcagcagcaccctgacgctgagcaaagcagactacgagaa

SEQ ID NO: 647 - DNA, 690 bp, Artificial Sequence
  Synthetic construct
gaatcaatgcctgggtcagagctctggagaagagctgctcagttaggacccagagggaaccatggaaaccccagcgcagcttctcttcctcctgctactctggctcccagataccaccggagaaattgtgttgacgcagtctccaggcaccctgtctttgtctccaggggaaagagccaccctctcctgcagggccagtcagagtgttagcaacagctacttagcctggtaccagcagaaacctggccaggctcccaggctcctcatctatggtgcatccagcagggccgctggcatcccagacaggttcagcggcagtgggtctgggacagacttcactctcaccatcagcagacttgagcctgaagattttgcagtgtattactgtcagcagtatggtagctcacctcggatcaccttcggccaagggacacgactggagattaaacgaactgtggctgcaccatctgtcttcatcttcccgccatctgatgagcagttgaaatctggaactgcctctgttgtgtgcctgctgaataacttctatcccagagaggccaaagtacagtggaaggtggataacgccctccaatcgggtaactcccaggagagtgtcacagagcaggacagcaaggacagcacctacagcctcagcagcaccctgacgctgagcaaagcagactacgagaa

SEQ ID NO: 648 - DNA, 749 bp, Artificial Sequence
  Synthetic construct
gggctcagggtggggtcaaaaacccggggaggggggtctgatttgcatggatggactctccccctctcagagtatgaagagagggagagatctgggggaagctcagcttcagctgtggtagagaagacaggattcaggacaatctccagcatggccggcttccctctcctcctcaccctcctcactcactgtgcagggtcctgggcccagtctgtgctgactcagccaccctcagcgtctgggacccccgggcagagggtcaccatctcttgttctggaagcaggtccaacatcggaagtaagtatgtatattggtaccagcagctcccaggaacggcccccaaactcctcatttataggaataatcagcggccctcaggggtccctgaccgattctctggctccaagtctggcacctcagcctccctggccatcagtgggctccggtccgaggatgaggctgattattactgtgcagcatgggatgacagcctgagtggtgtggtattcggcggagggaccaaggtgaccgtcctaggtcagcccaaggctgccccctcggtcactctgttcccaccctcctctgaggagcttcaagtcaacaaggccacactggtgtgtctcataagtgacttctacccgggagccgtgacagtggcctggaaggcagatagcagccccgtcaaggcgggagtggagaccaccacaccctccaaacaaagcaacaacaagtacgcggccagcagcta

SEQ ID NO: 649 - DNA, 685 bp, Artificial Sequence
  Synthetic construct
agatgggggctggggtctcaggaggcagcactctcgggacgtctccaccatggcctgggctctgctcctcctcaccctcctcactcagggcacaggatcctgggctcagtctgccctgactcagcctcgctcagtgtccgggtctcctggacagtcagtcaccatctcctgcactggatccagcagtaatattggtggttataactatgtctcctggtaccaacagcacccaggcaaagcccccaaactcatcatttatgatgtcagtaagcggccctcaggggtccctgatcgcttctctggctccaagtctggcaacacggcctccctgaccatctctgggctccaggctgaggatgaggctgattattactgctgctcatatgcaggcagctacaccccttgggtgttcggcggagggaccaagctgaccgtcctaggtcagcccaaggctgccccctcggtcactctgttcccgccctcctctgaggagcttcaagccaacaaggccacactggtgtgtctcataagtgacttctacccgggagccgtgacagtggcctggaaggcagatagcagccccgtcaaggcgggagtggagaccaccacaccctccaaacaaagcaacaacaagtacgcggccagcagctacctgagcctgacgcctgagcagtggaagtcccac

SEQ ID NO: 650 - DNA, 696 bp, Artificial Sequence
  Synthetic construct
ggggagctctacccttgccttgactgatcaggactcctcagttcaccttctcacaatgaggctccctgctcagctcctggggctgctaatgctctgggtcccaggatccagtggggatgttgtgatgactcagtctccactctccctgcccgtcacccttggacagccggcctccatctcctgcaggtctagtcaaagcctcgtacacactgatggaaacacctacttgaattggtttcagcagaggccaggccaatctccaaggcgcctaatttatcaggtttctaaccgggactctggggtcccagacagattcagcggcagtgggtcagacactgatttcacactgaaaatcagcagggtggaggctgaggatgttggggtttattactgcatgcaagggacacactggcctctttacagttttggccaggggaccaagctggagatcaaacgaactgtggctgcaccatctgtcttcatcttcccgccatctgatgagcagttgaaatctggaactgcctctgttgtgtgcctgctgaataacttctatcccagagaggccaaagtacagtggaaggtggataacgccctccaatcgggtaactcccaggagagtgtcacagagcaggacagcaaggacagcacctacagcctcagcagcaccctgacgctgagcaaagcagactacgagaa

SEQ ID NO: 651 - DNA, 780 bp, Artificial Sequence
  Synthetic construct
gggggctcatgaaatttgcttttgtactcactggttgtttttgcataggcccctccaggccacgaccagctgtttggattttataaacgggccctttgcattgtgaactgagctacaacaggcaggcaggggcagcaagatggtgttgcagacccaggtcttcatttctctgttgctctggatctctggtgcctacggggacatcgtgatgacccagtctccagactccctggctgtgtctctgggcgagagggccaccatcaactgcaagtccagccagagtgttttatacagttccaacaataagaactacttagcttggtaccagcagaaaccaggacagcctcctaagctgctcatttactgggcgtctacccgggaatccggggtccctgaccgattcagtggcagcgggtctgggacagatttcactctcaccataagcagcctgcaggctgaagatgtggcagtttattactgtcagcagtattatagtaccccctacagttttggccaggggaccaagctggagatcaaacgaactgtggctgcaccatctgtcttcatcttcccgccatctgatgagcagttgaaatctggaactgcctctgttgtgtgcctgctgaataacttctatcccagagaggccaaagtacagtggaaggtggataacgccctccaatcgggtaactcccaggagagtgtcacagagcaggacagcaaggacagcacctacagcctcagcagcaccctgacgctgagcaaagcagactacgagaa

SEQ ID NO: 652 - DNA, 704 bp, Artificial Sequence
  Synthetic construct
ggcctcaggctcagctgagagactgaagaacccagcattgcagcagctccaccatggcctgggctcctctgctcctcaccctcctcagtctcctcacagggtccctctcccagcctgtgctgactcagccaccttctgcatcagcctccctgggagcctcggtcacactcacctgcaccctgagcagcggctacagtaattataaagtggactggtaccagcagagaccaggaaagggcccccggtttgtgatgcgagtgggcactggtgggattgtgggatccaagggggatggcatccctgatcgcttctcagtcttgggctcaggcctgaatcggtacctgaccatcaagaacatccaggaagaggatgagggtgactaccactgtggggcagaccatgcccgtgggagcaaccccctggtggtattcggcggagggaccaagctgaccgtcctaggtcagcccaaggctgccccctcggtcactctgttcccaccctcctctgaggagcttcaagccaacaaggccacactggtgtgtctcataagtgacttctacccgggagccgtgacagtggcctggaaggcagatagcagccccgtcaaggcgggagtggagaccaccacaccctccaaacaaagcaacaacaagtacgcggccagcagctacctgagcctgacgcctgagcagtggaagtcccac

SEQ ID NO: 653 - DNA, 681 bp, Artificial Sequence
  Synthetic construct
tggggaggctggacacacttcatgcaggagtcagaccctgtcaggacacagcatagacatgagggtccccgctcagctcctggggctcctgctgctctggctcccaggtgccagatgtgccatccggatgacccagtctccatcctcattctctgcatctacaggagacagagtcaccatcacttgtcgggcgagtcagggtattagcagttatttggcctggtatcagcaaaaaccagggaaagcccctaacctcctaatctatgctgcatccactttgcaaagtggggtcccatcaaggttcagcggcagtggatctgggacagatttcactctcaccatcagctgcctgcagtctgaagattttgcaacttattactgtcaacagtattatagttacccgatcaccttcggccaagggacacgactggagattaaacgaactgtggctgcaccatctgtcttcatcttcccgccatctgatgagcagttgaaatctggaactgcctctgttgtgtgcctgctgaataacttctatcccagagaggccaaagtacagtggaaggtggataacgccctccaatcgggtaactcccaggagagtgtcacagagcaggacagcaaggacagcacctacagcctcagcagcaccctgacgctgagcaaagcagactacgagaa

SEQ ID NO: 654 - DNA, 685 bp, Artificial Sequence
  Synthetic construct
atggggaggctggtcacactttgtgcaggagtcagacccagtcaggacacagcatggacatgagggtccccgctcagctcctggggctcctgctgctctggctcccaggtgccaaatgtgacatccagatgacccagtctccttccaccctgtctgcatctgtaggagacagagtcaccatcacttgccgggccagtcagagtattagtagctggttggcctggtatcagcagaaaccagggaaagcccctaaactcctggtctataaggcgtctagtttagaaggtggggtcccatcaaggttcagcggcagtggatctgggacagaattcactctcaccatcagcagcctgcagcctgatgattttgcaacttattactgccaacagtataatagttattctcctcgggcgttcggccaagggaccaaggtggaattcaaacgaactgtggctgcaccatctgtcttcatcttcccgccatctgatgagcagttgaaatctggaactgcctctgttgtgtgcctgctgaataacttctatcccagagaggccaaagtacagtggaaggtggataacgccctccaatcgggtaactcccaggagagtgtcacagagcaggacagcaaggacagcacctacagcctcagcagcaccctgacgctgagcaaagcagactacgagaa

SEQ ID NO: 655 - DNA, 679 bp, Artificial Sequence
  Synthetic construct
tatctggggagagctctggggaggaactgctcagttaggacccagacggaaccatggaagccccagcgcagcttctcttcctcctgctactctggctcccagataccactggagaaatactgatgacgcagtctccagccaccctgtctgtgtctccaggggaaagagccaccctctcctgcagggccagtcagagtgttagcagcaacttagcctggtaccagcagaaacctggccaggctcccaggctcctcatctatggtgcatccatcagggccactggtatcccagccaggttcagtggcagtgggtctgggacagagttcactctcaccatcagcagcctgcagtctgaagattttgcaatttattactgtcagcagtataataactggccttcgtacacttttggccaggggaccaaactggagatcaaacgaactgtggctgcaccatctgtcttcatcttcccgccatctgatgagcagttgaaatctggaactgcctctgttgtgtgcctgctgaataacttctatcccagagaggccaaagtacagtggaaggtggataacgccctccaatcgggtaactcccaggagagtgtcacagagcaggacagcaaggacagcacctacagcctcagcagcaccctgacgctgagcaaagcagactacgagaa

SEQ ID NO: 656 - DNA, 706 bp, Artificial Sequence
  Synthetic construct
tgagggtttcttatatggggaagctctgcttcagctgtgagcgcagaaggcaggactcgggacaatcttcatcatgacctgctcccctctcctcctcacccttctcattcactgcacagggtcctgggcccagtctgtgttgacgcagccgccctcagtgtctgcggccccaggacagaaggtcaccatctcctgctctggaagcagctccaacattggaaataattatgtatcctggtaccagcacctcccaggaacagcccccaaactcctcatttatgacaataataaccgaccctcagggattcctgaccgattctctggctccaagtctggcacgtcagccaccctgggcatcaccggactccagactggggacgaggccgattattactgcggaacatgggatagcagcctgagtgctgcggtattcggcggagggaccaagctgaccgtcctacgtcagcccaaggctgccccctcggtcactctgttcccgccctcctctgaggagcttcaagccaacaaggccacactggtgtgtctcataagtgacttctacccgggagccgtgacagtggcctggaaggcagatagcagccccgtcaaggcgggagtggagaccaccacaccctccaaacaaagcaacaacaagtacgcggccagcagctatctgagcctgacgcctgagcagtggaagtcccac

SEQ ID NO: 657 - DNA, 692 bp, Artificial Sequence
  Synthetic construct
tgggggaagctctgcttcagctgtgagcgcagaaggcaggactcgggacaatcttcatcatgacctgctcccctctcctcctcacccttctcattcactgcacagggtcctgggcccagtctgtgttgacgcagccgccctcagtgtctgcggccccaggacagaaggtcaccatctcctgctctggaagcagctccaacattggaaataattatgtatcctggtaccagcacctcccaggaacagcccccaaactcctcatttatgacaataataaccgaccctcagggattcctgaccgattctctggctccaagtctggcacgtcagccaccctgggcatcaccggactccagactggggacgaggccgattattactgcggaacatgggatagcagcctgagtgctgcggtattcggcggagggaccaagctgaccgtcctacgtcagcccaaggctgccccctcggtcactctgttcccgccctcctctgaggagcttcaagccaacaaggccacactggtgtgtctcataagtgacttctacccgggagccgtgacagtggcctggaaggcagatagcagccccgtcaaggcgggagtggagaccaccacaccctccaaacaaagcaacaacaagtacgcggccagcagctatctgagcctgacgcctgagcagtggaagtcccac

SEQ ID NO: 658 - DNA, 696 bp, Artificial Sequence
  Synthetic construct
cgcccccccccccccggggggggggtctcaggaggcagcgctctcgggacgtctccaccatggcctgggctctgctgctcctcaccctcctcactcagggcacagggtcctgggcccagtctgccctgactcagcctgcctccgtgtctgggtctcctggacagtcgatcaccatctcctgcactggaaccagcagtgacgttggtggttataactatgtctcctggtaccaacagcacccaggcaaagcccccaaactcatgatttatgatgtcagtaagcggccctcaggggtttctaatcgcttctctggctccaagtctggcaacacggcctccctgaccatctctgggctccaggctgaggacgaggctgattattactgcagctcatatacaagcagcagcacttttgtggtattcggcggagggaccaagctgaccgtcctaggtcagcccaaggctgccccctcggtcactctgttcccgccctcctctgaggagcttcaagccaacaaggccacactggtgtgcctgatcagtgacttctacccgggagctgtgaaagtggcctggaaggcagatggcagccccgtcaacgcgggagtggagaccaccacaccctccaaacaaagcaacaacaagtacgcggccagcagctatctgagcctgacgcctgagcagtggaagtcccaca

SEQ ID NO: 659 - DNA, 671 bp, Artificial Sequence
  Synthetic construct
ggggagagctctggggaggaactgctcagttaggacccagacggaaccatggaagccccagcgcagcttctcttcctcctgctactctggctcccagataccactggagaaatagtgatgacgcagtctccagccaccctgtctgtgtctccaggggaaagagccaccctctcctgcagggccagtcagcgtgttagcagcaacttagcctggtaccagcagaaacctggccaggctcccaggctcctcatctatggtgcatccaccagggccactggtatcccagccaggttcagtggcagtgggtctgggacagagttcactctcaccatcagcagcctgcagtctgaagattttgcagtttattactgtcagcagtataataactggcctcggacgttcggccaagggaccaaggtggaaatcaaacgaactgtggctgcaccatctgtcttcatcttcccgccatctgatgagcagttgaaatctggaactgcctctgttgtgtgcctgctgaataacttctatcccagagaggccaaagtacagtggaaggtggataacgccctccaatcgggtaactcccaggagagtgtcacagagcaggacagcaaggacagcacctacagcctcagcagcaccctgacgctgagcaaagcagactacgagaa

SEQ ID NO: 660 - DNA, 672 bp, Artificial Sequence
  Synthetic construct
gggggacatcctgtgcagaagtctctctcagtcaggacacagcatggacatgagggtccctgctcagctcctgggactcctgctgctctggctcccagataccagatgtgacatccagatgacccagtctccatcctccctgtctgcatctgtaggagacagagtcaccatcacttgccgggcgagtcagggcattagcaattatttagcctggtatcagcagaaaccagggaaagttcctaagctcctgatctatgctgcatccactttgcaatcaggggtcccatctcggttcagcggcagtggatctgggacagatttcactctcaccatcagcagcctgcagcctgaagatgttgcaacttattactgtcaaaagtataacagtgcccctcgcactttcggcggagggaccaaggtggagatcaaacgaactgtggctgcaccatctgtcttcatcttcccgccatctgatgagcagttgaaatctggaactgcctctgttgtgtgcctgctgaataacttctatcccagagaggccaaagtacagtggaaggtggataacgccctccaatcgggtaactcccaggagagtgtcacagagcaggacagcaaggacagcacctacagcctcagcagcaccctgacgctgagcaaagcagactacgagaa

SEQ ID NO: 661 - DNA, 700 bp, Artificial Sequence
  Synthetic construct
gggtgagagagaataagagaggcctggggagcctagctgtgctgtgggtccaggaggcagaactctgggtgtctcaccatggcctggatccctctacttctccccctcctcactctctgcacaggctctgaggcctcctatgacctgacacagccaccctcggtgtcagtgtccccaggacagacggccaggatcacctgctctggagatgcattgccaaagcaatatgcttattggtaccagcagaagccaggccaggcccctgtgctggtgatatataaagacagtgagaggccctcagggatccctgagcgattctctggctccagctcagggacaacagtcacgttgaccatcagtggagtccaggcagaagacgaggctgactattactgtcaatcagcagacagcagtggtgtggtattcggcggagggaccaagctgaccgtcctaggtcagcccaaggctgccccctcggtcactctgttcccgccctcctctgaggagcttcaagccaacaaggccacactggtgtgtctcataagtgacttctacccgggagccgtgacagtggcctggaaggcagatagcagccccgtcaaggcgggagtggagaccaccacaccctccaaacaaagcaacaacaagtacgcggccagcagctatctgagcctgacgcctgagcagtggaagtcccaca

SEQ ID NO: 662 - DNA, 705 bp, Artificial Sequence
  Synthetic construct
atgtcgtatatggggaagctctgcttcagctgtgagcgcagaaggcaggactcgggacaatcttcatcatgacctgctcccctctcctcctcacccttctcattcactgcacagggtcctgggcccagtctgtgttgacgcagccgccctcagtgtctgcggccccaggacagaaggtcaccatctcctgctctggaagcagctccaacattgggaataattatgtatcctggtaccagcagctcccaggaacagcccccaaactcctcatttatgacaataataagcgaccctcagggattcctgaccgattctctggctccaagtctggcacgtcagccaccctgggcatcaccggactccagactggggacgaggccgattattactgcggaacatgggatagcagcctgagtgctcatgtggtattcggcggagggaccaagctgaccgtcctaggtcagcccaaggctgccccctcggtcactctgttcccgccctcctctgaggagcttcaagccaacaaggccacactggtgtgtctcataagtgacttctacccgggagccgtgacagtggcctggaaggcagatagcagccccgtcaaggcgggagtggagaccaccacaccctccaaacaaagcaacaacaagtacgcggccagcagctacctgagcctgacgcctgagcagtggaagtcccaca

SEQ ID NO: 663 - DNA, 669 bp, Artificial Sequence
  Synthetic construct
gtcttatatggggaggagtcagacccagtcaggacacagcatggacatgagggtccccgctcagctcctggggctcctgctgctctggctcccaggtgccaaatgtgacatccagatgacccagtctccttccaccctgtctgcatctgtaggagacagagtcaccatcacttgccgggccagtcagagtattagtagctggttggcctggtatcagcagaaaccagggaaagcccctaagctcctgatctataaggcgtctagtttagaaagtggggtcccatcaaggttcagcggcagtggatctgggacagaattcactctcaccatcagcagcctgcagcctgatgattttgcaacttattactgccaacagtataatagttacctgtacagttttggccaggggaccaagctggagatcaaacgaactgtggctgcaccatctgtcttcatcttcccgccatctgatgagcagttgaaatctggaactgcctctgttgtgtgcctgctgaataacttctatcccagagaggccaaagtacagtggaaggtggataacgccctccaatcgggtaactcccaggagagtgtcacagagcaggacagcaaggacagcacctacagcctcagcagcaccctgacgctgagcaaagcagactacgagaa

SEQ ID NO: 664 - DNA, 706 bp, Artificial Sequence
  Synthetic construct
tttacactttcttatatggggagctctgcttcagctgtgagcgcagaaggcaggactcgggacaatcttcatcatgacctgctcccctctcctcctcacccttctcattcactgcacagggtcctgggcccagtctgtgttgacgcagccgccctcagtgtctgcggccccaggacagaaggtcaccatctcctgctctggaagcagctccaacattgggaataattatgtatcctggtaccagcagctcccaggaacagcccccaaactcctcatttatgacaataataagcgaccctcagggattcctgaccgattctctggctccaagtctggcacgtcagccaccctgggcatcaccggactccagactggggacgaggccgattattactgcggaacatgggatagcagcctgagtgggggggtgttcggcggagggaccaagctgaccgtcctaggtcagcccaaggctgccccctcggtcactctgttcccgccctcctctgaggagcttcaagccaacaaggccacactggtgtgtctcataagtgacttctacccgggagccgtgacagtggcctggaaggcagatagcagccccgtcaaggcgggagtggagaccaccacaccctccaaacaaagcaacaacaagtacgcggccagcagctatctgagcctgacgcctgagcagtggaagtcccac

SEQ ID NO: 665 - DNA, 674 bp, Artificial Sequence
  Synthetic construct
gggggtcagagccctggggaggaactgctcagttaggacccagagggaaccatggaagccccagctcagcttctcttcctcctgctactctggctcccagataccactggagaaattgtgttgacacagtctccagccaccctgtctttgtctccaggggaaagagccaccctctcctgcagggccagtcagagtgttagcagctacttagcctggtaccaacagaaacctggccaggctcccaggctcctcatctatgatgcatccaacagggccactggcatcccagccaggttcagtggcagtgggtctgggacagacttcactctcaccatcagcagcctagagcctgaagattttgcagtttattactgtcagcagcgtagcaactggcccctcaccttcggccaagggacacgactggagattaaacgaactgtggctgcaccatctgtcttcatcttcccgccatctgatgagcagttgaaatctggaactgcctctgttgtgtgcctgctgaataacttctatcccagagaggccaaagtacagtggaaggtggataacgccctccaatcgggtaactcccaggagagtgtcacagagcaggacagcaaggacagcacctacagcctcagcagcaccctgacgctgagcaaagcagactacgagaa

SEQ ID NO: 666 - DNA, 814 bp, Artificial Sequence
  Synthetic construct
gagtctgcagagagagctgagctgcatccccaggtctcaaggaggggcccggcagtccctgggtggaaacacatttgcatgagcagcccctcctctgcaagggtgggaagaaaaggaggcctggggcagcccagtcccactgcgggggtaagaggttgtgtccaccatggcctggactcctctcctcctcctgttcctctctcactgcacaggttccctctcgcaggctgtgctgactcagccggcttccctctctgcatctcctggagcatcagccagtctcacctgcaccttgcgcagtggcatcaatgttggtacctacaggatatactggtaccagcagaagccagggagtcctccccagtatctcctgaggtacaaatcagactcagataagcagcagggctctggagtccccagccgcttctctggatccaaagatgcttcggccaatgcagggattttactcatctctgggctccagtctgaggatgaggctgactattactgtatgatttggcacagcagcgcttgggtgttcggcggagggaccaagctgaccgtcctaggtcagcccaaggctgccccctcggtcactctgttcccgccctcctctgaggagcttcaagccaacaaggccacactggtgtgtctcataagtgacttctacccgggagccgtgacagtggcctggaaggcagatagcagccccgtcaaggcgggagtggagaccaccacaccctccaaacaaagcaacaacaagtacgcggccagcagctacctgagcctgacgcctgagcagtggaagtcccac

SEQ ID NO: 667 - protein, 132 aa, Artificial Sequence
  Synthetic construct
AVRLVQSGTQMKEPGASVTISCVTSGYEFVEVLMNWVRQVPGRGLEWMGWMNPRGGGVNYARQFQGKVTMTRDMYRDTAYLTLSGLTSGDTAKYFCVRGRSCCGGRRHCNGADCFNWDFQYWGQGTLVIVSP

SEQ ID NO: 668 - protein, 124 aa, Artificial Sequence
  Synthetic construct
EAQLEESGGKLVQPGGSLRLSCSASGFSLEDNDMHWVRQGEGRGLEWVSSIGSSGDTYYADSIKGRFTISRDNGRNSVYLQIKTLNVGDTAVYFCIRGPESGWFYHYYFGLGVWGRGTTVTVSS

SEQ ID NO: 669 - protein, 133 aa, Artificial Sequence
  Synthetic construct
EAQLLESGGGLVQPGGSLRLSCEASGFSFNMYGMSWVRQGPGKGLEWVAFVSGNSDKRDYEDSVKGRFTISRDNSNKRLYLQMNGLRGEDTATYFCARDEVLRGSASWFLGPNEVRHYGMDVWGRGTTVVVSS

SEQ ID NO: 670 - protein, 124 aa, Artificial Sequence
  Synthetic construct
EARLVESGGGLVQPGGSLRLSCVASEFTFGDYDMHWVRQVTGKGLEWMSSIGGGGDSYYLDSVKGRFTISRQNGRSSLFLQMNNLRPGDTGVYYCVRGPSSGWWYHEYSGLDVWGQGTTVIVSS

SEQ ID NO: 671 - protein, 124 aa, Artificial Sequence
  Synthetic construct
EDQLVESGGGLVQPGGSVRLSCAASGFDFGDFDMHWIRQATGKGLEWVASIGGPRDRYYLDSVKDRFIVSRDNGDNKLYLQIKSLKDEDTALYFCARGPSSGWHLHYYFGMGLWGRGTAVTVSS

SEQ ID NO: 672 - protein, 124 aa, Artificial Sequence
  Synthetic construct
EDQLVESGGGLVQPGGSVRLSCAASGFDFGDFDMHWIRQATGKGLEWVASIGGPRDRYYLDSVKGRFIVSRDNGGNKLYLDMKSLKDEDTALYYCARGPSSGWHLHYYFGMGLWGRGTAVTVSS

SEQ ID NO: 673 - protein, 124 aa, Artificial Sequence
  Synthetic construct
EEQLVESGGGLVQPGGSVRLSCAASGFDFGDFDMHWIRQPTGKGLEWVASIGGPRDRYYLDSVKDRFTVSRDNGGNKLYLQMKSLKDEDTALYYCARGPSSGWHLHYYFGMGLWGRGTAVTVSS

SEQ ID NO: 674 - protein, 124 aa, Artificial Sequence
  Synthetic construct
EVQLVESGGGLARPGESLRLSCAASGFSVIENDMHWVRQITGEGLEWVSSIGAGAGTYYADSVKGRFIVSRENGRNSVYLQIKSLRPDDTGVYYCVRGPSSGWHLHYYFGMDLWGRGTTVTVSS

SEQ ID NO: 675 - protein, 124 aa, Artificial Sequence
  Synthetic construct
EVQLVESGGGLVRPGGSVRLSCAASGFDCSENDMHWVRQVTGKGLEWVASIGGGEMTYYAASAKGRFTVSRQKVKNSLYLQINNLRDDDTGIYYCVRGPSSGWHLHYYFGMDLWGRGTTVTVAS

SEQ ID NO: 676 - protein, 124 aa, Artificial Sequence
  Synthetic construct
EVQLVESGGGLVRPGGSVRLSCAASGFDCSENDMHWVRQVTGKGLEWVASIGGGEMTYYAASAKGRFTVTRQKVKNSLYLQINNLRDDDTGIYYCVRGASSGWHLHYYFGMDLWGRGTTVTVAS

SEQ ID NO: 677 - protein, 124 aa, Artificial Sequence
  Synthetic construct
EVQLVESGGGLVRPGGSVRLSCAASGFDCTENDMHWVRQVTGKGLEWVASIGGGEMTYYAASAKGRFTVSRQKVRNSVYLQINNLRDDDTGIYYCVRGPSSGWHLHYYFGMDLWGRGTTVTVAS

SEQ ID NO: 678 - protein, 125 aa, Artificial Sequence
  Synthetic construct
EVRLRQSGAGVKKPGASVRVSCEASGYTFIKYYLHWIRQVPGGHPEWIGWINPRGGQVNYSRQFPGKFTMTRDTIRETAYLDVRGLTSDDTAVYYCVRTAYCERDPCKGWVFPHWGQGTLVIVSP

SEQ ID NO: 679 - protein, 130 aa, Artificial Sequence
  Synthetic construct
EVRLVQSGAMIKTPGSSVKISCRASGYNFRDYSIHWVRLIPDKGFEWIGWIKPLWGAVSYARQLQGRVSMTRQLSQDPDDPDWGVAYVELSGLTSADTAEYFCVRRGSCGYCGDFPWQYWGQGTVVVVSA

SEQ ID NO: 680 - protein, 130 aa, Artificial Sequence
  Synthetic construct
EVRLVQSGAVIKTPGSSVKISCRASGYNFRDYSIHWVRLIPDKGFERIGWIKPLWGAVGYARQLQGRVSLTRQLSQDPDDPDWGIAYMEFSGLTSADTAEYFCVRRGSCGYCGDFPWQYWGQGTAVVVSA

SEQ ID NO: 681 - protein, 130 aa, Artificial Sequence
  Synthetic construct
EVRLVQSGAVIKTPGSSVKISCRASGYNFRDYSIHWVRLIPDKGFEWIGWIKPLWGAVGYARQLQGRVSLTRQLSQDPDDPDWGIAYMEFSGLTSADTAEYFCVRRGSCGYCGDFPWQYWGQGTAVVVSA

SEQ ID NO: 682 - protein, 130 aa, Artificial Sequence
  Synthetic construct
EVRLVQSGAVIKTPGSSVKISCRASGYNFRDYSIHWVRLIPEKGFEWIGWIKPLWGAVSYARQLQGRVSMTRQLSQDPDDPDWGVAYMEFSGLTSADTAEYFCVRRGSCDYCGDFPWQYWGQGTVVVVSS

SEQ ID NO: 683 - protein, 130 aa, Artificial Sequence
  Synthetic construct
EVRLVQSGTMIKTPGSSVKISCRASGYNFRDYSIHWVRLIPDKGFEWIGWIKPLWGAVSYARQLQGRVSMTRQLSQDPDDPDWGVAYMELSGLTSADTAEYFCVRRGSCGYCGDFPWQYWGQGTVVVVSA

SEQ ID NO: 684 - protein, 126 aa, Artificial Sequence
  Synthetic construct
GVRLAQSGAEVKKVGSSVTVSCAASGYKLVDHIMYWFRHVPGRGFEWMGWIKPYGGAVNFGGNFRDRATLTRKLTDTDEGIFYLKLDGLTVADTGVYYCVRRFVCDHCSDYTFGHWGQGTQIVVSP

SEQ ID NO: 685 - protein, 126 aa, Artificial Sequence
  Synthetic construct
HVELKQSGPQQRKPGASVRVSCNAEDYDYMDYFIHWVRQAPGLGPEWLGLINPRFGAMTLNYKFRDRLSLTRDISTGMFYMDLSGLRSEDTAIYYCARDAGERGLRGYSVGFFDSWGRGTLVTVSS

SEQ ID NO: 686 - protein, 131 aa, Artificial Sequence
  Synthetic construct
KVQLLESGGGLVQPGGSLRLSCKASGFTFHKFDMSWVRQAPGRGLEWVSGIRDSGGKSYYVDSVKGRFTISRDNSMDTLYLQMNSLTAEDTATYYCAKVVAGGQLRYFDWQEGHYYGMDVWGQGTTVIVSS

SEQ ID NO: 687 - protein, 129 aa, Artificial Sequence
  Synthetic construct
QFQLQESGPGLVKPSETLSLTCIVSGGSIDTTDHYWGWIRQSPGKGLEWIGTSYYSGKTYYNPSLSGRVTISIDTSKNHFSLRLISVTAADTAVYHCARHRADYDFWGGSNLRGYFDPWGRGTLVTVSS

SEQ ID NO: 688 - protein, 129 aa, Artificial Sequence
  Synthetic construct
QFQLQESGPGLVKPSQTLSLTCVVSGGSIGTTDHYWGWIRQSPGKGLEWIGTTYYSGKTYYNPSLNSRVTIAIDTSKNQFSLRLISVTAADTAVYHCARHRANYDFWGGSNLRGYFDPWGRGTLVTVSS

SEQ ID NO: 689 - protein, 116 aa, Artificial Sequence
  Synthetic construct
QVLLVQSGAEVKKPGASVKVSCKTSGYTFNSYGISWVRQAPGQGLEWMGWISAYRGETKYAQNFQGRLTMTTDTSTNTAYMELRTLTSDDTAVFYCARGRVYSDYWGQGTPVTVSS

SEQ ID NO: 690 - protein, 126 aa, Artificial Sequence
  Synthetic construct
QVQLLESGPGLVKPSQTLSLTCTVSGGSINSGSYYWTWIRQSAGKGLEWIGNIFPTGRTNYSPSFKSRVFISRDTSKNQFSLTLTSMTVADTAVYHCAREHTMIFGVAEGFWFDPWGQGTLVTVSS

SEQ ID NO: 691 - protein, 129 aa, Artificial Sequence
  Synthetic construct
QVQLQESGPGLLKTSETLSLSCVVSGVSVSSSNHYWGWVRQTPGRGLEWIATVYSSGKTYFNPSLKSRVIISVDTSNNQFSLKMTSLTVADTAVYYCARHRADYDFWNGNNLRGYFDPWGQGALVTVSS

SEQ ID NO: 692 - protein, 123 aa, Artificial Sequence
  Synthetic construct
QVQLQESGPGLVKPSETLSLTCSISSRYLTVRSGTYWAWVRQSPGKGLEWIGSISQSGTTYHSPSLKNEITISLDTSNNQIFLKLTPVTAADTAFYYCATRGIAASGFYFQHWGRGTLVSISS

SEQ ID NO: 693 - protein, 123 aa, Artificial Sequence
  Synthetic construct
QVQMVQSGAEMKKPGSSVKVSCKASGASWSHYAVNWVRQAPGQGLEWMGGVIPAFNVINYAQKFQGRVTISTDESTTTVFLEVKSLKSDDTANYYCVGRQKYISGNVGDFDFWGQGTMIIVSS

SEQ ID NO: 694 - protein, 122 aa, Artificial Sequence
  Synthetic construct
QVQVVQSGAEVKKPGSSVRVSCKASGGLFRSHAVSWVRQAPGQGLEWMGGIVALFGTTNYAQKFQDRVTITADESTNTVYLELNSLRSDDTAMYYCVTMSGYHVSNTYLDAWGQGTLVTVSS

SEQ ID NO: 695 - protein, 121 aa, Artificial Sequence
  Synthetic construct
QVRLSQSGGQMKKPGESMRISCRASGYEFIDCTINWIRVAPGRRPEWMGWLKPRGGAVNYARPLQGRVTMTRDVYSDTAFLELRSLTADDTAVYFCTRGKNCNYNWDFEHWGRGTPVTVSS

SEQ ID NO: 696 - protein, 125 aa, Artificial Sequence
  Synthetic construct
QVRLSQSGGQMKKPGESMRISCRASGYEFINCPINWIRLAPGKRPEWMGWMKPRGGAVSYARQFQGRVTMTRDMYSETAFLELRSLTSDDTAVYFCTRGKYCTARDYYNWDFEHWGQGTPVTVSS

SEQ ID NO: 697 - protein, 121 aa, Artificial Sequence
  Synthetic construct
QVRLSQSGGQMKKPGESMRISCRASGYEFMDCLINWIRLAPGRRPEWMGWVRPRGGAVNYARPLQGRVTMTRDVYSDTAFLELRSLTADDTAVYFCTRGKNCDDNWDFEHWGRGTPVTVSS

SEQ ID NO: 698 - protein, 125 aa, Artificial Sequence
  Synthetic construct
QVRLSQSGGQMKKPGESMRLSCRASGYEFLNCPINWIRLAPGKRPEWMGWLKPRGGAVNYARKFHGRVTMTRDVYSDTAFLELRSLTSDDTAVYFCTRGKYCTARDYYNWDFEHWGRGAPVTVSP

SEQ ID NO: 699 - protein, 125 aa, Artificial Sequence
  Synthetic construct
QVRLSQSGGQMKKPGESMRLSCRASGYEFLNCPINWIRLAPGRRPEWMGWLKPRGGAVNYARKFHGRVTMTRDVYSDTAFLELSSLTSDDTAVYFCTRGKYCTARDYYNWDFEYWGRGAPVTVSP

SEQ ID NO: 700 - protein, 125 aa, Artificial Sequence
  Synthetic construct
QVRLSQSGGQMKKPGESMRLSCRASGYEFLNCPINWIRLAPGRRPEWMGWLKPRGGAVNYARKFQGRLTMTRDVYSDTAFLELRSLTSDDTAVYFCTRGKYCTARDYYNWDFEHWGRGAPVTVSS

SEQ ID NO: 701 - protein, 125 aa, Artificial Sequence
  Synthetic construct
QVRLSQSGGQRKKPGESMRISCRASGYEFINCPINWIRLAPGKRPEWMGWMKPRGGAVSYARQFQGRVTMTRDMYSETAFLELRSLTSDDTAVYFCTRGKYCTARDYYNWDFEHWGQGTPVTVSS

SEQ ID NO: 702 - protein, 132 aa, Artificial Sequence
  Synthetic construct
QVRLVQSGPQIKTPGASVTISCGTSGYDFMESLINWVRQDIGKGPEWMGWINPRGGGVNYAHRFQGKVTMTRDVSSGTAYVTLRGLTSDDTAKYYCVRGKSCCGGRRYCNGADCFNWDFEHWGQGTLVIVSS

SEQ ID NO: 703 - protein, 132 aa, Artificial Sequence
  Synthetic construct
QVRLVQSGPQIKTPGASVTISCGTSGYDFMESLINWVRQDIGKGPEWMGWINPRGGGVNYARRFQGKVTMTRDVSSGTAYLTLRGLTSDDTAKYYCVRGKSCCGGRRYCNGADCFNWDFEHWGQGTLVIVSS

SEQ ID NO: 704 - protein, 126 aa, Artificial Sequence
  Synthetic construct
QVRLVQSGTLLKTIGSSMRISCEASGYNFVDFFIQWFRHVPGRGFEWIGWLNPHGGAVNFGGNFRDRVTLTRKVSDTDAATIFMEMRGLTPADTATYYCVRRGHCDHCYEWTLQHWGQGTLVVVSP

SEQ ID NO: 705 - protein, 132 aa, Artificial Sequence
  Synthetic construct
QVRLVQSGTQIKTPGASVTLSCGTSGYDFMESLINWVRQDSGKGPEWLGWMNPRGGGVNYAHRFQGKVTMTRDVSSGTAYLTLRGLTSDDTAKYYCVRGRSCCDGRRYCNGADCFNWDFEHWGQGTLVIVSP

SEQ ID NO: 706 - protein, 125 aa, Artificial Sequence
  Synthetic construct
SQALVQSGSQMKKPGDSVRLSCQTSDSAITKYFIHWIRQAPGKGLEWIAWISPYGGGVNYGWQVRDRATLTRNIHMETIYFDLRGLRPDDTATYYCAMRDYCRDDSCNIWDLRHWGQGSLIVVSA

SEQ ID NO: 707 - protein, 125 aa, Artificial Sequence
  Synthetic construct
SQALVQSGSQMKKPGDSVRLSCQTSDSAITKYFIHWIRQAPGKGLEWIAWISPYGGGVNYGWQVRDRATLTRNIHMETVYMELRGLRPDDTATYYCAMRDYCRDDNCNIWDLRHWGQGSLIVVSA

SEQ ID NO: 708 - protein, 125 aa, Artificial Sequence
  Synthetic construct
SQALVQSGSQMKKPGDSVRLSCQTSDSAITKYFIHWIRQAPGKGLEWIAWISPYGGRVNYGWQVRDRATLTRNIHMETVYMDLRGLRPDDTATYYCAMRDYCRDDNCNKWDLRHWGQGSLIVVSA

SEQ ID NO: 709 - protein, 125 aa, Artificial Sequence
  Synthetic construct
SQALVQSGSQMKKPGDSVRLSCQTSDSAITKYFIHWIRQAPGKGLEWIAWISPYGGRVNYGWQVRDRATLTRNIHMETVYMDLRGLRPDDTATYYCAMRDYCRDDNCNRWDLRHWGQGSLIVVSA

SEQ ID NO: 710 - protein, 125 aa, Artificial Sequence
  Synthetic construct
SQALVQSGSQMKKPGDSVRLSCQTSDSAITKYFIHWIRQAPGKGLEWIAWISPYGGRVNYGWQVRDRATLTRNIHMETVYMELRGLRPDDTATYYCAMRDYCRDDNCNKWDLRHWGQGSLIVVSA

SEQ ID NO: 711 - protein, 132 aa, Artificial Sequence
  Synthetic construct
TVRLVQSGTQMKEPGASVTISCVTSGYEFVEVLINWVRQVPGRGLEWMGWMNPRGGGVNYARQFQGKVTMTRDVYRDTAYLTLSGLTSGDTAKYFCVRGSSCCGGRRHCNGADCFNWDFQYWGQGTLVIVSP

SEQ ID NO: 712 - protein, 8 aa, Artificial Sequence
  Synthetic construct
DSAITKYF

SEQ ID NO: 713 - protein, 8 aa, Artificial Sequence
  Synthetic construct
DYDYMDYF

SEQ ID NO: 714 - protein, 8 aa, Artificial Sequence
  Synthetic construct
EFTFGDYD

SEQ ID NO: 715 - protein, 7 aa, Artificial Sequence
  Synthetic construct
FDCSEND

SEQ ID NO: 716 - protein, 8 aa, Artificial Sequence
  Synthetic construct
GASWSHYA

SEQ ID NO: 717 - protein, 8 aa, Artificial Sequence
  Synthetic construct
GFDCSEND

SEQ ID NO: 718 - protein, 8 aa, Artificial Sequence
  Synthetic construct
GFDCTEND

SEQ ID NO: 719 - protein, 8 aa, Artificial Sequence
  Synthetic construct
GFDFGDFD

SEQ ID NO: 720 - protein, 8 aa, Artificial Sequence
  Synthetic construct
GFSFNMYG

SEQ ID NO: 721 - protein, 8 aa, Artificial Sequence
  Synthetic construct
GFSLEDND

SEQ ID NO: 722 - protein, 8 aa, Artificial Sequence
  Synthetic construct
GFSVIEND

SEQ ID NO: 723 - protein, 8 aa, Artificial Sequence
  Synthetic construct
GFTFHKFD

SEQ ID NO: 724 - protein, 8 aa, Artificial Sequence
  Synthetic construct
GGLFRSHA

SEQ ID NO: 725 - protein, 10 aa, Artificial Sequence
  Synthetic construct
GGSIDTTDHY

SEQ ID NO: 726 - protein, 10 aa, Artificial Sequence
  Synthetic construct
GGSIGTTDHY

SEQ ID NO: 727 - protein, 10 aa, Artificial Sequence
  Synthetic construct
GGSINSGSYY

SEQ ID NO: 728 - protein, 10 aa, Artificial Sequence
  Synthetic construct
GVSVSSSNHY

SEQ ID NO: 729 - protein, 8 aa, Artificial Sequence
  Synthetic construct
GYDFMESL

SEQ ID NO: 730 - protein, 8 aa, Artificial Sequence
  Synthetic construct
GYEFIDCT

SEQ ID NO: 731 - protein, 8 aa, Artificial Sequence
  Synthetic construct
GYEFINCP

SEQ ID NO: 732 - protein, 8 aa, Artificial Sequence
  Synthetic construct
GYEFLNCP

SEQ ID NO: 733 - protein, 8 aa, Artificial Sequence
  Synthetic construct
GYEFMDCL

SEQ ID NO: 734 - protein, 8 aa, Artificial Sequence
  Synthetic construct
GYEFVEVL

SEQ ID NO: 735 - protein, 8 aa, Artificial Sequence
  Synthetic construct
GYKLVDHI

SEQ ID NO: 736 - protein, 8 aa, Artificial Sequence
  Synthetic construct
GYNFRDYS

SEQ ID NO: 737 - protein, 8 aa, Artificial Sequence
  Synthetic construct
GYNFVDFF

SEQ ID NO: 738 - protein, 8 aa, Artificial Sequence
  Synthetic construct
GYTFIKYY

SEQ ID NO: 739 - protein, 8 aa, Artificial Sequence
  Synthetic construct
GYTFNSYG

SEQ ID NO: 740 - protein, 11 aa, Artificial Sequence
  Synthetic construct
SRYLTVRSGTY

SEQ ID NO: 741 - protein, 7 aa, Artificial Sequence
  Synthetic construct
IFPTGRT

SEQ ID NO: 742 - protein, 7 aa, Artificial Sequence
  Synthetic construct
IGAGAGT

SEQ ID NO: 743 - protein, 7 aa, Artificial Sequence
  Synthetic construct
IGGGEMT

SEQ ID NO: 744 - protein, 7 aa, Artificial Sequence
  Synthetic construct
IGGGGDS

SEQ ID NO: 745 - protein, 7 aa, Artificial Sequence
  Synthetic construct
IGGPRDR

SEQ ID NO: 746 - protein, 7 aa, Artificial Sequence
  Synthetic construct
IGSSGDT

SEQ ID NO: 747 - protein, 8 aa, Artificial Sequence
  Synthetic construct
IKPLWGAV

SEQ ID NO: 748 - protein, 8 aa, Artificial Sequence
  Synthetic construct
IKPYGGAV

SEQ ID NO: 749 - protein, 8 aa, Artificial Sequence
  Synthetic construct
INPRFGAM

SEQ ID NO: 750 - protein, 8 aa, Artificial Sequence
  Synthetic construct
INPRGGGV

SEQ ID NO: 751 - protein, 8 aa, Artificial Sequence
  Synthetic construct
INPRGGQV

SEQ ID NO: 752 - protein, 8 aa, Artificial Sequence
  Synthetic construct
IRDSGGKS

SEQ ID NO: 753 - protein, 8 aa, Artificial Sequence
  Synthetic construct
ISAYRGET

SEQ ID NO: 754 - protein, 8 aa, Artificial Sequence
  Synthetic construct
ISPYGGGV

SEQ ID NO: 755 - protein, 8 aa, Artificial Sequence
  Synthetic construct
ISPYGGRV

SEQ ID NO: 756 - protein, 7 aa, Artificial Sequence
  Synthetic construct
ISQSGTT

SEQ ID NO: 757 - protein, 8 aa, Artificial Sequence
  Synthetic construct
IVALFGTT

SEQ ID NO: 758 - protein, 8 aa, Artificial Sequence
  Synthetic construct
LKPRGGAV

SEQ ID NO: 759 - protein, 8 aa, Artificial Sequence
  Synthetic construct
LNPHGGAV

SEQ ID NO: 760 - protein, 8 aa, Artificial Sequence
  Synthetic construct
MKPRGGAV

SEQ ID NO: 761 - protein, 8 aa, Artificial Sequence
  Synthetic construct
MNPRGGGV

SEQ ID NO: 762 - protein, 7 aa, Artificial Sequence
  Synthetic construct
SYYSGKT

SEQ ID NO: 763 - protein, 7 aa, Artificial Sequence
  Synthetic construct
TYYSGKT

SEQ ID NO: 764 - protein, 8 aa, Artificial Sequence
  Synthetic construct
VIPAFNVI

SEQ ID NO: 765 - protein, 8 aa, Artificial Sequence
  Synthetic construct
VRPRGGAV

SEQ ID NO: 766 - protein, 8 aa, Artificial Sequence
  Synthetic construct
VSGNSDKR

SEQ ID NO: 767 - protein, 7 aa, Artificial Sequence
  Synthetic construct
VYSSGKT

SEQ ID NO: 768 - protein, 24 aa, Artificial Sequence
  Synthetic construct
AKVVAGGQLRYFDWQEGHYYGMDV

SEQ ID NO: 769 - protein, 18 aa, Artificial Sequence
  Synthetic construct
AMRDYCRDDNCNIWDLRH

SEQ ID NO: 770 - protein, 18 aa, Artificial Sequence
  Synthetic construct
AMRDYCRDDNCNKWDLRH

SEQ ID NO: 771 - protein, 18 aa, Artificial Sequence
  Synthetic construct
AMRDYCRDDNCNRWDLRH

SEQ ID NO: 772 - protein, 18 aa, Artificial Sequence
  Synthetic construct
AMRDYCRDDSCNIWDLRH

SEQ ID NO: 773 - protein, 19 aa, Artificial Sequence
  Synthetic construct
ARDAGERGLRGYSVGFFDS

SEQ ID NO: 774 - protein, 26 aa, Artificial Sequence
  Synthetic construct
ARDEVLRGSASWFLGPNEVRHYGMDV

SEQ ID NO: 775 - protein, 18 aa, Artificial Sequence
  Synthetic construct
AREHTMIFGVAEGFWFDP

SEQ ID NO: 776 - protein, 18 aa, Artificial Sequence
  Synthetic construct
ARGPSSGWHLHYYFGMGL

SEQ ID NO: 777 - protein, 9 aa, Artificial Sequence
  Synthetic construct
ARGRVYSDY

SEQ ID NO: 778 - protein, 21 aa, Artificial Sequence
  Synthetic construct
ARHRADYDFWGGSNLRGYFDP

SEQ ID NO: 779 - protein, 21 aa, Artificial Sequence
  Synthetic construct
ARHRADYDFWNGNNLRGYFDP

SEQ ID NO: 780 - protein, 21 aa, Artificial Sequence
  Synthetic construct
ARHRANYDFWGGSNLRGYFDP

SEQ ID NO: 781 - protein, 14 aa, Artificial Sequence
  Synthetic construct
ATRGIAASGFYFQH

SEQ ID NO: 782 - protein, 23 aa, Artificial Sequence
  Synthetic construct
DTAEYFCVRRGSCDYCGDFPWQY

SEQ ID NO: 783 - protein, 23 aa, Artificial Sequence
  Synthetic construct
DTAEYFCVRRGSCGYCGDFPWQY

SEQ ID NO: 784 - protein, 18 aa, Artificial Sequence
  Synthetic construct
IRGPESGWFYHYYFGLGV

SEQ ID NO: 785 - protein, 17 aa, Artificial Sequence
  Synthetic construct
RGPSSGWHLHYYFGMDL

SEQ ID NO: 786 - protein, 14 aa, Artificial Sequence
  Synthetic construct
TRGKNCDDNWDFEH

SEQ ID NO: 787 - protein, 14 aa, Artificial Sequence
  Synthetic construct
TRGKNCNYNWDFEH

SEQ ID NO: 788 - protein, 18 aa, Artificial Sequence
  Synthetic construct
TRGKYCTARDYYNWDFEH

SEQ ID NO: 789 - protein, 18 aa, Artificial Sequence
  Synthetic construct
TRGKYCTARDYYNWDFEY

SEQ ID NO: 790 - protein, 16 aa, Artificial Sequence
  Synthetic construct
VGRQKYISGNVGDFDF

SEQ ID NO: 791 - protein, 18 aa, Artificial Sequence
  Synthetic construct
VRGASSGWHLHYYFGMDL

SEQ ID NO: 792 - protein, 25 aa, Artificial Sequence
  Synthetic construct
VRGKSCCGGRRYCNGADCFNWDFEH

SEQ ID NO: 793 - protein, 18 aa, Artificial Sequence
  Synthetic construct
VRGPSSGWHLHYYFGMDL

SEQ ID NO: 794 - protein, 18 aa, Artificial Sequence
  Synthetic construct
VRGPSSGWWYHEYSGLDV

SEQ ID NO: 795 - protein, 25 aa, Artificial Sequence
  Synthetic construct
VRGRSCCDGRRYCNGADCFNWDFEH

SEQ ID NO: 796 - protein, 25 aa, Artificial Sequence
  Synthetic construct
VRGRSCCGGRRHCNGADCFNWDFQY

SEQ ID NO: 797 - protein, 25 aa, Artificial Sequence
  Synthetic construct
VRGSSCCGGRRHCNGADCFNWDFQY

SEQ ID NO: 798 - protein, 18 aa, Artificial Sequence
  Synthetic construct
VRTAYCERDPCKGWVFPH

SEQ ID NO: 799 - protein, 15 aa, Artificial Sequence
  Synthetic construct
VTMSGYHVSNTYLDA

SEQ ID NO: 800 - protein, 19 aa, Artificial Sequence
  Synthetic construct
YYCVRRFVCDHCSDYTFGH

SEQ ID NO: 801 - protein, 19 aa, Artificial Sequence
  Synthetic construct
YYCVRRGHCDHCYEWTLQH

SEQ ID NO: 802 - protein, 103 aa, Artificial Sequence
  Synthetic construct
AVMLAQSPGTLSLSPGDRATLLCRASQGIGNELAWYQHKRGQTPRLIVYGASQRAPGVPDRFGGSVSGSDFTLIINRLQTEDFAFYFCQHRETFGPGTKLDLN

SEQ ID NO: 803 - protein, 103 aa, Artificial Sequence
  Synthetic construct
AVMLAQSPGTLSLSPGDRITLLCRASQGIGNELAWYQQKRGQTPRLIVYGASQRAPGVPDRFGGSVSGSDFSLIINRLETEDFAFYFCQHRETFGPGTKLDLK

SEQ ID NO: 804 - protein, 103 aa, Artificial Sequence
  Synthetic construct
AVMLAQSPGTLSLSPGDRTTLLCRASQGIGNELAWYQQKRGQTPRLIVYGASQRAPGVPDRFGGSVSGSDFTLIINRLETEDFAFYFCQHRETFGPGTKLDLK

SEQ ID NO: 805 - protein, 103 aa, Artificial Sequence
  Synthetic construct
AVMLTQSPGTLSLSPGDRATLLCRASQGIGNELAWYQQKRGQTPRLILYGASQRAPGVPDRFGGSVSGSDFTLIINSLETEDFAFYFCQHRETFGPGTKLDLK

SEQ ID NO: 806 - protein, 103 aa, Artificial Sequence
  Synthetic construct
AVMLTQSPGTLSLSPGDRSTLLCRASQGIGNELAWYQQKRGQTPRLIVYGASQRAPGVPDRFGGSVSGSDFTLIINRLETEDFAFYFCQHRETFGPGTKLDLK

SEQ ID NO: 807 - protein, 109 aa, Artificial Sequence
  Synthetic construct
DIQMTQSPSSLSLSIGERVTITCQASQGISNYLNWYQQKPGKAPKLLIYDASNLETGVSSRFSGSGSGTHFTFTISNLQAEDAGTYYCQQYTNLPPALNFGGGTKVEIK

SEQ ID NO: 808 - protein, 107 aa, Artificial Sequence
  Synthetic construct
DIQMTQSPSTLSASVGDKVTITCRASQSVGSSLAWYQQKPGRGPQLLISKASIIQSGVPSRFSGGGSGTDFTLTINNLQPDDLATYYCHHYNSFSHTFGQGTKVEFK

SEQ ID NO: 809 - protein, 112 aa, Artificial Sequence
  Synthetic construct
DIVLTQSPLSLPVIPGEPASISCRSSQSLLYSNGYKYLDWYLQKPGQSPQLLVYLGSNRASGVPDRFSGSGSGTDFTLKISRVEAEDVGVYYCMQSLQTPHSFGQGTKLEIK

SEQ ID NO: 810 - protein, 112 aa, Artificial Sequence
  Synthetic construct
DIVLTQTPPSLSVIPGQSASISCRSSQSLLNSDQQRTYLSWFLQKPGQSPQLLIFDVSSRFSGVPDRFSGSGAGRDFTLKISRVEAGDAGIYYCMQSLQLRSFGQGTKLEIR

SEQ ID NO: 811 - protein, 113 aa, Artificial Sequence
  Synthetic construct
DIVMTQSPLSLAVTLGEPAALSCRSSQSLLQYNGRNYVDWYLQKPGQSPQLLIYLGSHRASGVPDRFSGSGSGKDFTLKISRVEAEDIGVYYCMESLQTPRLTFGGGTKVEIK

SEQ ID NO: 812 - protein, 113 aa, Artificial Sequence
  Synthetic construct
DIVMTQSPLSLAVTLGEPAALSCRSSQSLLQYNGRNYVDWYLQKPGQSPQLLIYLGSHRASGVPDRFSGSGSGKDFTLKISRVEAEDIGVYYCMETLQTPRLTFGGGTKVEIK

SEQ ID NO: 813 - protein, 108 aa, Artificial Sequence
  Synthetic construct
DVVLTQSPGTLSVSPGGRVSLSCRSSHGLSRNELGWYQHRRGQSPRLLVYDASTRATGIPDRFSGSGSGTDFNLTISRLETEDFAIYYCHQYGTTPYTFGPGTKVDVK

SEQ ID NO: 814 - protein, 113 aa, Artificial Sequence
  Synthetic construct
DVVMSQSPLSLAVTPGEPASISCRSSQSLLQYNGWNYLDWYLHKPGQPPQLLIYLGSHRASGVPDRFTGSGSGTVFTLKISRVEAEDVGVYYCMQSLQTPRLSFGEGTKVEIK

SEQ ID NO: 815 - protein, 113 aa, Artificial Sequence
  Synthetic construct
DVVMTQSPLSLAVTPGEPASISCRSSRSLLQYNGRNYLDWYLHKPGQPPQLLIYLGSHRASGVPDRFTGSGSGTAFTLQISRVEAEDVGVYYCMQSLETPRLSFGEGTKVEIK

SEQ ID NO: 816 - protein, 113 aa, Artificial Sequence
  Synthetic construct
DVVVTQSPLSLAVTPGEPASISCRSSQSLRQYNGRNYLDWYLHKPGQSPQLLIYLGSHRASGVPDRFTGSGSGTDFTLKISRVEAEDAGVYYCMQSLETPRLSFGEGTKVEIK

SEQ ID NO: 817 - protein, 108 aa, Artificial Sequence
  Synthetic construct
EIVLTQSPGILSLSPGDSASFSCRASQRISSYNLAWYQLKPDQAPRLLVHGTSNRATGIPDRFSGSGSGTDFTLTISRLEPEDFAVYFCQQYGTSPTTFGPGTKVDFR

SEQ ID NO: 818 - protein, 108 aa, Artificial Sequence
  Synthetic construct
EIVLTQSPGIMSLSPGDSASFSCRASQRISSYNLAWYQHKPDQAPRLLIYGTSNRATGIPDRFSGSGSGTDFTLTISRLEPEDFAVYFCQQYGTSPTTFGPGTKVDFR

SEQ ID NO: 819 - protein, 109 aa, Artificial Sequence
  Synthetic construct
EIVLTQSPGTLSLSPGERATLSCRAGQSINIGYLAWYQQKPGQPPRLLIYATSNRATDIPDRFSGSGSGTDFTLTISRLEPEDFAVYYCQQSGTSPPWTFGQGTKVEIK

SEQ ID NO: 820 - protein, 108 aa, Artificial Sequence
  Synthetic construct
EIVLTQSPGTLSLSPGERATLSCRASQSISSNYLAWYQQKPGQAPRLLIYGASARATGIPDRFSGSGSGTDFTLTISRLEPEDFAVYFCQQYANSPLTFGGGTKVDIK

SEQ ID NO: 821 - protein, 108 aa, Artificial Sequence
  Synthetic construct
EIVLTQSPGTLSVSPGERATLSCRPSQTFTNTNLAWYQQKPGQAPRLLIYGASSRATGVPDRFSGSRSGTDFTLTISRLEPEDFAIYYCQQYGSSPTTFGPGTKVDMK

SEQ ID NO: 822 - protein, 102 aa, Artificial Sequence
  Synthetic construct
EVVLTQSPDTLSLSPGETGTLYCRASQGVVSLAWFQKKPGQPPRLILYDTSRRATGTPDRFSGSGSGTNFFLTITRAQREDFAVYFCQDQEFFGRGTKVDMK

SEQ ID NO: 823 - protein, 102 aa, Artificial Sequence
  Synthetic construct
EVVLTQSPDTLSVSPGEVGTLFCRANQGVSSLAWYQHKHGQPPRLVIYDTSRRASGIPDRFTGSGSGTNFFLTITRLEPEDFGVYFCQDRQSFGQGTKVDMK

SEQ ID NO: 824 - protein, 102 aa, Artificial Sequence
  Synthetic construct
EVVLTQSPDTLSVSPGEVGTLFCRASQGVSSLAWYQHKHGQPPKLVIYDTSRRASGIPDRFTGSGSGTNFFLTITRLEPEDFGVYFCQDRQSFGQGTKVDMK

SEQ ID NO: 825 - protein, 102 aa, Artificial Sequence
  Synthetic construct
EVVLTQSPGTLSLSPGERATLFCKASQGGSAITWYQKRRGQVPRLLIYDTSRRASGVPDRFVGSGSGTDFSLTITKLDREDFAVYYCQQFEFFGLGTALEVH

SEQ ID NO: 826 - protein, 102 aa, Artificial Sequence
  Synthetic construct
EVVLTQSPGTLSLSPGERATLFCKASQGGSAITWYQKRRGQVPRLLIYDTTRRASGVPDRFVGSGSGTDFSLTITKLDREDFAVYYCQQFEFFGLGTALEVH

SEQ ID NO: 827 - protein, 102 aa, Artificial Sequence
  Synthetic construct
EVVLTQSPGTLSLSPGERATLFCKASQGGSAITWYQRRRGQVPRLLIYDTTRRASGVPDRFVGSGSGTDFSLTITKLDREDFAVYYCQQFEFFGLGTALEVH

SEQ ID NO: 828 - protein, 102 aa, Artificial Sequence
  Synthetic construct
EVVLTQSPGTLSVSPGERVTLFCKASQGGNAVTWYQKRRGQVPRLLIYDTSRRASGIPDRFVGSGSGTNFSLTITKVDREDFAVYYCQQFEFFGLGTALEVH

SEQ ID NO: 829 - protein, 113 aa, Artificial Sequence
  Synthetic construct
LIMMTQSPLSLIVTPGESASISCRSSQSLLESNGHNYLDWYQQKPGQSPRLLIYWGSHRASGAPDRFSGSGSGTDFVLKISRVESEDAGVYFCMQARQTPRLSFGGGTRVEIK

SEQ ID NO: 830 - protein, 113 aa, Artificial Sequence
  Synthetic construct
MIMLTQSPLSLAVTPGEPASISCRSSQSLLLGNGRNYLDWYVQRPGQSPQLLIYLASHRAPGVPDRFSGSGSGTDFTLKISRVEADDVGFYYCMQARQTPRLSFGEGTKVEIK

SEQ ID NO: 831 - protein, 113 aa, Artificial Sequence
  Synthetic construct
NIVMSQSPLSLAVTLGEPASISCRSSQSLLVYNGHNYLDWYMQKPGHSPQLLIYLGSHRASGVPDRFSGSGSGRDFTLKISRVEAEDVGVYYCMEALQTPRLTFGGGTKVEIK

SEQ ID NO: 832 - protein, 104 aa, Artificial Sequence
  Synthetic construct
NLVMTQFPGTLSVSPGDTATLSCRFSQDVSSGHVAWFQQKRGQAPRLVMFAASVRATNIPDRFTGSGSGSDFTLTISRLESEDFAVYYCQFLENFGHGTKIEMK

SEQ ID NO: 833 - protein, 104 aa, Artificial Sequence
  Synthetic construct
NLVMTQFPGTLSVSPGDTATLSCRFSQDVSSGHVAWFQQKRGQAPRLVMFAASVRATNIPDRFTGTGSGSDFTLTISRLESEDFAVYYCQFLENFGHGTKIEMK

SEQ ID NO: 834 - protein, 108 aa, Artificial Sequence
  Synthetic construct
PSKLTQDPVMSVALGQTVKITCRGDSLRTYYASWYQQKPGQAPLLLIYGKNSRPSGISGRFSGSTSGNPASLTITGAQAEDEADYYCSSRDTDDISVIFGGGTKLTVL

SEQ ID NO: 835 - protein, 101 aa, Artificial Sequence
  Synthetic construct
TAGLTQSPGTLSLSPGETAIISCRTSQHGNLGWYQQRPGQAPRLVMYSGSTRAPGIPDRFSGSRWGADYNLTISNLESGDFGVYYCQQYEFFGQGTKVQVD

SEQ ID NO: 836 - protein, 101 aa, Artificial Sequence
  Synthetic construct
TAGLTQSPGTLSLSPGETAIISCRTSQHGNLGWYQQRPGQAPRLVMYSGSTRATGIPDRFSGSRWGADYNLTISNLESEDFGVYYCQQYEFFGQGTKVQVD

SEQ ID NO: 837 - protein, 101 aa, Artificial Sequence
  Synthetic construct
TAGLTQSPGTLSLSPGETAIISCRTSQSGSLAWYQQRPGQAPRLVIYSGSTRAAGIPDRFSGSRWGADYNLSISNLESGDFGVYYCQQYEFFGQGTKVQVD

SEQ ID NO: 838 - protein, 101 aa, Artificial Sequence
  Synthetic construct
TAGLTQSPGTLSLSPGETAIISCRTSQYGSLAWYQQRPGQAPRLVIYSGSTRAAGIPDRFSGSRWGADYNLTISNLESGDFGVYFCQQYEFFGQGTKVQVD

SEQ ID NO: 839 - protein, 101 aa, Artificial Sequence
  Synthetic construct
TAGLTQSPGTLSLSPGETAIISCRTSQYGSLAWYQQRPGQAPRLVIYSGSTRAAGIPDRFSGSRWGPDYNLTISNLESGDFGVYFCQQYEFFGQGTKVQVD

SEQ ID NO: 840 - protein, 101 aa, Artificial Sequence
  Synthetic construct
TAGLTQSPGTLSLSPGETAILSCRTSQHGNLGWYQQRPGQAPRLVMYSGSTRATGIPDRFSGSRWGADYNLTISNLESEDFGVYYCQQYEFFGQGTKVQVD

SEQ ID NO: 841 - protein, 104 aa, Artificial Sequence
  Synthetic construct
YIGLTQSPDTLSVSPGERATLSCRPSQAISKNHLAWYRQKSGQPPKLLMTGTYERATGVPDRFVGSGSGTNYTLTITKVEAEDFAVYFCQSFEGFGQGTKLEIK

SEQ ID NO: 842 - protein, 104 aa, Artificial Sequence
  Synthetic construct
YIGLTQSPDTLSVSPGERATLSCRPSQAISKNHLAWYRQNRGQPPKLLMTGTYERAAGVPDRFVGSGSGTNYTLTITKVEAEDFAVYFCQSFEGFGQGTKLEIK

SEQ ID NO: 843 - protein, 104 aa, Artificial Sequence
  Synthetic construct
YIGLTQSPGTLSVFPGERATLSCRPSQAISKNHLAWYRQKSGQPPRLLMTGTYERASGVPDRFVGSGSGTNYTLTITKVEAEDFAVYFCQCFEGFGQGTKLEIK

SEQ ID NO: 844 - protein, 104 aa, Artificial Sequence
  Synthetic construct
YIGVTQSPAILSVSRGERVTLSCKTSQAIAPRQLVWHRQKGGQAPSLVMTATSERASGIPDRFIGSGSGTDFTLTITRLESEDFAVYYCQCLEAFGQGTKLEIN

SEQ ID NO: 845 - protein, 104 aa, Artificial Sequence
  Synthetic construct
YIGVTQSPGILSVSLGERVTLSCKTSQAITPRQLVWHRQKGGQAPSLVMTGTSERASGIPDRFIGSGSGTDFTLTITRLEAEDFAVYYCQCLEAFGQGTKLEIN

SEQ ID NO: 846 - protein, 7 aa, Artificial Sequence
  Synthetic construct
ANQGVSS

SEQ ID NO: 847 - protein, 7 aa, Artificial Sequence
  Synthetic construct
ASQGGNA

SEQ ID NO: 848 - protein, 7 aa, Artificial Sequence
  Synthetic construct
ASQGGSA

SEQ ID NO: 849 - protein, 7 aa, Artificial Sequence
  Synthetic construct
ASQGVSS

SEQ ID NO: 850 - protein, 7 aa, Artificial Sequence
  Synthetic construct
ASQGVVS

SEQ ID NO: 851 - protein, 7 aa, Artificial Sequence
  Synthetic construct
HGLSRNE

SEQ ID NO: 852 - protein, 7 aa, Artificial Sequence
  Synthetic construct
QAIAPRQ

SEQ ID NO: 853 - protein, 7 aa, Artificial Sequence
  Synthetic construct
QAISKNH

SEQ ID NO: 854 - protein, 7 aa, Artificial Sequence
  Synthetic construct
QAITPRQ

SEQ ID NO: 855 - protein, 7 aa, Artificial Sequence
  Synthetic construct
QDVSSGH

SEQ ID NO: 856 - protein, 6 aa, Artificial Sequence
  Synthetic construct
QGIGNE

SEQ ID NO: 857 - protein, 6 aa, Artificial Sequence
  Synthetic construct
QGISNY

SEQ ID NO: 858 - protein, 4 aa, Artificial Sequence
  Synthetic construct
QHGN

SEQ ID NO: 859 - protein, 7 aa, Artificial Sequence
  Synthetic construct
QRISSYN

SEQ ID NO: 860 - protein, 7 aa, Artificial Sequence
  Synthetic construct
QSINIGY

SEQ ID NO: 861 - protein, 7 aa, Artificial Sequence
  Synthetic construct
QSISSNY

SEQ ID NO: 862 - protein, 11 aa, Artificial Sequence
  Synthetic construct
QSLLESNGHNY

SEQ ID NO: 863 - protein, 11 aa, Artificial Sequence
  Synthetic construct
QSLLLGNGRNY

SEQ ID NO: 864 - protein, 12 aa, Artificial Sequence
  Synthetic construct
QSLLNSDQQRTY

SEQ ID NO: 865 - protein, 11 aa, Artificial Sequence
  Synthetic construct
QSLLQYNGRNY

SEQ ID NO: 866 - protein, 11 aa, Artificial Sequence
  Synthetic construct
QSLLQYNGWNY

SEQ ID NO: 867 - protein, 11 aa, Artificial Sequence
  Synthetic construct
QSLLVYNGHNY

SEQ ID NO: 868 - protein, 11 aa, Artificial Sequence
  Synthetic construct
QSLLYSNGYKY

SEQ ID NO: 869 - protein, 11 aa, Artificial Sequence
  Synthetic construct
QSLRQYNGRNY

SEQ ID NO: 870 - protein, 6 aa, Artificial Sequence
  Synthetic construct
QSVGSS

SEQ ID NO: 871 - protein, 7 aa, Artificial Sequence
  Synthetic construct
QTFTNTN

SEQ ID NO: 872 - protein, 11 aa, Artificial Sequence
  Synthetic construct
RSLLQYNGRNY

SEQ ID NO: 873 - protein, 6 aa, Artificial Sequence
  Synthetic construct
SLRTYY

SEQ ID NO: 874 - protein, 6 aa, Artificial Sequence
  Synthetic construct
TSQHGN

SEQ ID NO: 875 - protein, 6 aa, Artificial Sequence
  Synthetic construct
TSQSGS

SEQ ID NO: 876 - protein, 6 aa, Artificial Sequence
  Synthetic construct
TSQYGS

SEQ ID NO: 877 - protein, 3 aa, Artificial Sequence
  Synthetic construct
AAS

SEQ ID NO: 878 - protein, 3 aa, Artificial Sequence
  Synthetic construct
ATS

SEQ ID NO: 879 - protein, 3 aa, Artificial Sequence
  Synthetic construct
DAS

SEQ ID NO: 880 - protein, 3 aa, Artificial Sequence
  Synthetic construct
DTS

SEQ ID NO: 881 - protein, 3 aa, Artificial Sequence
  Synthetic construct
DTT

SEQ ID NO: 882 - protein, 3 aa, Artificial Sequence
  Synthetic construct
DVS

SEQ ID NO: 883 - protein, 3 aa, Artificial Sequence
  Synthetic construct
GAS

SEQ ID NO: 884 - protein, 3 aa, Artificial Sequence
  Synthetic construct
GKN

SEQ ID NO: 885 - protein, 3 aa, Artificial Sequence
  Synthetic construct
GTS

SEQ ID NO: 886 - protein, 3 aa, Artificial Sequence
  Synthetic construct
GTY

SEQ ID NO: 887 - protein, 3 aa, Artificial Sequence
  Synthetic construct
KAS

SEQ ID NO: 888 - protein, 3 aa, Artificial Sequence
  Synthetic construct
LAS

SEQ ID NO: 889 - protein, 3 aa, Artificial Sequence
  Synthetic construct
LGS

SEQ ID NO: 890 - protein, 3 aa, Artificial Sequence
  Synthetic construct
SGS

SEQ ID NO: 891 - protein, 3 aa, Artificial Sequence
  Synthetic construct
WGS

SEQ ID NO: 892 - protein, 9 aa, Artificial Sequence
  Synthetic construct
HHYNSFSHT

SEQ ID NO: 893 - protein, 9 aa, Artificial Sequence
  Synthetic construct
HQYGTTPYT

SEQ ID NO: 894 - protein, 10 aa, Artificial Sequence
  Synthetic construct
MEALQTPRLT

SEQ ID NO: 895 - protein, 10 aa, Artificial Sequence
  Synthetic construct
MESLQTPRLT

SEQ ID NO: 896 - protein, 10 aa, Artificial Sequence
  Synthetic construct
METLQTPRLT

SEQ ID NO: 897 - protein, 10 aa, Artificial Sequence
  Synthetic construct
MQARQTPRLS

SEQ ID NO: 898 - protein, 10 aa, Artificial Sequence
  Synthetic construct
MQSLETPRLS

SEQ ID NO: 899 - protein, 8 aa, Artificial Sequence
  Synthetic construct
MQSLQLRS

SEQ ID NO: 900 - protein, 9 aa, Artificial Sequence
  Synthetic construct
MQSLQTPHS

SEQ ID NO: 901 - protein, 10 aa, Artificial Sequence
  Synthetic construct
MQSLQTPRLS

SEQ ID NO: 902 - protein, 5 aa, Artificial Sequence
  Synthetic construct
QCFEG

SEQ ID NO: 903 - protein, 5 aa, Artificial Sequence
  Synthetic construct
QCLEA

SEQ ID NO: 904 - protein, 5 aa, Artificial Sequence
  Synthetic construct
QDQEF

SEQ ID NO: 905 - protein, 5 aa, Artificial Sequence
  Synthetic construct
QDRQS

SEQ ID NO: 906 - protein, 5 aa, Artificial Sequence
  Synthetic construct
QFLEN

SEQ ID NO: 907 - protein, 5 aa, Artificial Sequence
  Synthetic construct
QHRET

SEQ ID NO: 908 - protein, 5 aa, Artificial Sequence
  Synthetic construct
QQFEF

SEQ ID NO: 909 - protein, 10 aa, Artificial Sequence
  Synthetic construct
QQSGTSPPWT

SEQ ID NO: 910 - protein, 9 aa, Artificial Sequence
  Synthetic construct
QQYANSPLT

SEQ ID NO: 911 - protein, 5 aa, Artificial Sequence
  Synthetic construct
QQYEF

SEQ ID NO: 912 - protein, 9 aa, Artificial Sequence
  Synthetic construct
QQYGSSPTT

SEQ ID NO: 913 - protein, 9 aa, Artificial Sequence
  Synthetic construct
QQYGTSPTT

SEQ ID NO: 914 - protein, 11 aa, Artificial Sequence
  Synthetic construct
QQYTNLPPALN

SEQ ID NO: 915 - protein, 5 aa, Artificial Sequence
  Synthetic construct
QSFEG

SEQ ID NO: 916 - protein, 11 aa, Artificial Sequence
  Synthetic construct
SSRDTDDISVI

SEQ ID NO: 917 - protein, 18 aa, Artificial Sequence
  Synthetic construct
AMRDYCRDDSCNIWDLRH

SEQ ID NO: 918 - protein, 18 aa, Artificial Sequence
  Synthetic construct
AMRDYCRDDNCNIWDLRH

SEQ ID NO: 919 - protein, 18 aa, Artificial Sequence
  Synthetic construct
VRTAYCERDPCKGWVFPH

SEQ ID NO: 920 - protein, 16 aa, Artificial Sequence
  Synthetic construct
VRRFVCDHCSDYTFGH

SEQ ID NO: 921 - protein, 16 aa, Artificial Sequence
  Synthetic construct
VRRGHCDHCYEWTLQH

SEQ ID NO: 922 - protein, 16 aa, Artificial Sequence
  Synthetic construct
VRRGSCDYCGDFPWQY

SEQ ID NO: 923 - protein, 16 aa, Artificial Sequence
  Synthetic construct
VRRGSCGYCGDFPWQY

SEQ ID NO: 924 - protein, 25 aa, Artificial Sequence
  Synthetic construct
VRGSSCCGGRRHCNGADCFNWDFQY

SEQ ID NO: 925 - protein, 25 aa, Artificial Sequence
  Synthetic construct
VRGRSCCGGRRHCNGADCFNWDFQY

SEQ ID NO: 926 - protein, 25 aa, Artificial Sequence
  Synthetic construct
VRGKSCCGGRRYCNGADCFNWDFEH

SEQ ID NO: 927 - protein, 25 aa, Artificial Sequence
  Synthetic construct
VRGRSCCDGRRYCNGADCFNWDFEH

SEQ ID NO: 928 - protein, 18 aa, Artificial Sequence
  Synthetic construct
TRGKYCTARDYYNWDFEH

SEQ ID NO: 929 - protein, 18 aa, Artificial Sequence
  Synthetic construct
TRGKYCTARDYYNWDFEY

SEQ ID NO: 930 - protein, 14 aa, Artificial Sequence
  Synthetic construct
TRGKNCDDNWDFEH

SEQ ID NO: 931 - protein, 14 aa, Artificial Sequence
  Synthetic construct
TRGKNCNYNWDFEH

SEQ ID NO: 932 - protein, 18 aa, Artificial Sequence
  Synthetic construct
VRGPSSGWWYHEYSGLDV

SEQ ID NO: 933 - protein, 18 aa, Artificial Sequence
  Synthetic construct
IRGPESGWFYHYYFGLGV

SEQ ID NO: 934 - protein, 18 aa, Artificial Sequence
  Synthetic construct
ARGPSSGWHLHYYFGMGL

SEQ ID NO: 935 - protein, 18 aa, Artificial Sequence
  Synthetic construct
VRGPSSGWHLHYYFGMDL

SEQ ID NO: 936 - protein, 18 aa, Artificial Sequence
  Synthetic construct
VRGASSGWHLHYYFGMDL

SEQ ID NO: 937 - protein, 10 aa, Artificial Sequence
  Synthetic construct
MQSLETPRLS

SEQ ID NO: 938 - protein, 10 aa, Artificial Sequence
  Synthetic construct
MQSLQTPRLS

SEQ ID NO: 939 - protein, 21 aa, Artificial Sequence
  Synthetic construct
ARHRADYDFWNGNNLRGYFDP

SEQ ID NO: 940 - protein, 21 aa, Artificial Sequence
  Synthetic construct
ARHRANYDFWGGSNLRGYFDP

SEQ ID NO: 941 - protein, 21 aa, Artificial Sequence
  Synthetic construct
ARHRADYDFWGGSNLRGYFDP

SEQ ID NO: 942 - protein, 26 aa, Artificial Sequence
  Synthetic construct
ARDEVLRGSASWFLGPNEVRHYGMDV

SEQ ID NO: 943 - protein, 16 aa, Artificial Sequence
  Synthetic construct
VGRQKYISGNVGDFDF

SEQ ID NO: 944 - protein, 14 aa, Artificial Sequence
  Synthetic construct
ATGRIAASGFYFQH

SEQ ID NO: 945 - protein, 15 aa, Artificial Sequence
  Synthetic construct
VTMSGYHVSNTYLDA

SEQ ID NO: 946 - protein, 9 aa, Artificial Sequence
  Synthetic construct
ARGRVYSDY

SEQ ID NO: 947 - protein, 19 aa, Artificial Sequence
  Synthetic construct
ARDAGERGLRGYSVGFFDS

SEQ ID NO: 948 - protein, 24 aa, Artificial Sequence
  Synthetic construct
AKVVAGGQLRYFDWQEGHYYGMDV

SEQ ID NO: 949 - DNA, 47 bp, Artificial Sequence
  Synthetic construct
  misc_feature (22)..(34): n is a, c, g, or t
ccttggcacccgagaattccannnnnnnnnnnnncccatataagaaa

SEQ ID NO: 950 - DNA, 13 bp, Artificial Sequence
  Synthetic construct
catgattggctca

SEQ ID NO: 951 - DNA, 13 bp, Artificial Sequence
  Synthetic construct
tgtccggcaataa

SEQ ID NO: 952 - DNA, 13 bp, Artificial Sequence
  Synthetic construct
gatcgtaatacca

SEQ ID NO: 953 - DNA, 15 bp, Artificial Sequence
  Synthetic construct
tcctttcctgatagg

SEQ ID NO: 954 - DNA, 15 bp, Artificial Sequence
  Synthetic construct
taactcagggcctat

SEQ ID NO: 955 - DNA, 15 bp, Artificial Sequence
  Synthetic construct
gctcctttacacgta

SEQ ID NO: 956 - DNA, 15 bp, Artificial Sequence
  Synthetic construct
gcagcgtataagtca

SEQ ID NO: 957 - DNA, 15 bp, Artificial Sequence
  Synthetic construct
atcgtcgagagctag

SEQ ID NO: 958 - DNA, 15 bp, Artificial Sequence
  Synthetic construct
caggtcccttatttc

SEQ ID NO: 959 - DNA, 15 bp, Artificial Sequence
  Synthetic construct
acaatttgtctgcga

SEQ ID NO: 960 - DNA, 15 bp, Artificial Sequence
  Synthetic construct
tgaccttcctctcct

SEQ ID NO: 961 - DNA, 15 bp, Artificial Sequence
  Synthetic construct
aatcacggtccttgt

SEQ ID NO: 962 - DNA, 20 bp, Artificial Sequence
  Synthetic construct
ccttggcacccgagaattcc
